(19) United States
(12) Patent Application Publication
(10) Pub. No.: US 2024/0360196 A1
(43) Pub. Date: Oct. 31, 2024

(54) INHIBITORY CHIMERIC ANTIGEN RECEPTORS

(71) Applicants: ALLOGENE THERAPEUTICS, INC., South San Francisco, CA (US); CELLECTIS, PARIS (FR)

(72) Inventors: Arvind RAJPAL, San Francisco, CA (US); Shobha Chowdary POTLURI, Foster City, CA (US); Laurent POIROT, Paris (FR); Alexandre JUILLERAT, New York, NY (US); Thomas Charles PERTEL, San Mateo, CA (US); Donna Marie STONE, Brisbane, CA (US); Barbra Johnson SASU, San Francisco, CA (US)

(73) Assignees: ALLOGENE THERAPEUTICS, INC., South San Francisco, CA (US); CELLECTIS, PARIS (FR)

(21) Appl. No.: 18/607,387

(22) Filed: Mar. 15, 2024

Related U.S. Application Data
(63) Continuation of application No. 17/385,805, filed on Jul. 26, 2021, now abandoned.
Application No. 17/385,805 is a division of application No. 15/525,906, filed on May 10, 2017, now Pat. No. 11,072,644.
(60) Provisional application No. 62/081,960, filed on Nov. 19, 2014.
(60) Provisional application No. 62/078,927, filed on Nov. 12, 2014.

(51) Int. Cl. C07K 14/705; A61K 35/17; A61K 39/00; C07K 14/725; C07K 16/28; C07K 16/30; C12N 5/0783

(52) U.S. Cl. CPC C07K 14/70503; A61K 35/17; C07K 14/7051; C07K 14/70517; C07K 14/70521; C07K 14/70578; C07K 16/2803; C07K 16/3069; C12N 5/0636; A61K 2039/5156; C07K 2317/622; C07K 2317/76; C07K 2319/03; C07K 2319/70; C07K 2319/74; C12N 2510/00

(57) ABSTRACT

The invention relates to an inhibitory chimeric antigen receptor (N-CAR) comprising
an extracellular domain comprising an antigen binding domain,
a transmembrane domain and,
an intracellular domain
wherein the intracellular domain comprises an Immunoreceptor Tyrosine-based Switch Motif ITSM, wherein said ITSM is a sequence of amino acid TX₁YX₂X₃X₄, wherein
X₁ is an amino acid
X₂ is an amino acid
X₃ is an amino acid and
X₄ is V or I.

### CROSS-REFERENCE TO RELATED APPLICATIONS

[0001] This application is a continuation of U.S. application Ser. No. 17/385,805, filed on Jul. 26, 2021, which is a divisional of U.S. application Ser. No. 15/525,906, filed on May 10, 2017, issued as U.S. Pat. No. 11,072,644 on Jul. 27, 2021, which is a 371 application of PCT Application No. PCT/IB2015/058650, filed on Nov. 9, 2015, which claims priority to, and the benefit of, U.S. Provisional Application No. 62/081,960, filed on Nov. 19, 2014, and U.S. Provisional Application No. 62/078,927, filed on Nov. 12, 2014, the contents of each of which is hereby incorporated by reference in its entirety.

### INCORPORATION-BY-REFERENCE OF SEQUENCE LISTING

[0002] The present specification makes reference to a Sequence Listing (submitted electronically as a .xml file named “20240315 ALG-002US3 SL.xml” on Mar. 15, 2024). The .xml file was generated on Mar. 15, 2024 and is 2,677 KB in size. The entire contents of the sequence listing are herein incorporated by reference.

### FIELD OF THE INVENTION

[0003] The invention relates to negative T-cell signal inducing chimeric antigen receptor (N-CAR or ICAR) and to T-cells comprising such N-CAR as well as a positive T-cell signal inducing CAR (P-CAR) as well as their use in therapy.

### BACKGROUND

[0004] T-cell therapies based on redirected T-cell targeting using chimeric antigen receptor (CAR) are beginning to show great promise in the clinic, particularly in the oncology setting (see Hutchinson L., Nat Rev Clin Oncol. 2014 Oct. 28; Lee D W et al., Lancet. 2014 Oct. 10. pii: S0140-6736 (14)61403-3 or Grupp S A et al., N Engl J Med. 2013 Apr. 18; 368 (16): 1509-18). Given the growing enthusiasm of the field, there is a significant effort being made to identify appropriate targets for CAR T-cell therapy. Given the potency of such therapeutics, the field's ability to identify novel targets for such therapy is hindered by concerns about on-target off-tissue (meaning off-tumor) activity. Such events not only mitigate efficacy but also present tremendous safety challenges as demonstrated by recent clinical events (see Morgan R A et al., Mol Ther. 2010 April; 18 (4): 843-51; Morgan R A et al., J Immunother. 2013 February; 36 (2): 133-51 or Linette G P et al., Blood. 2013 Aug. 8; 122 (6): 863-71). Clinical approaches to mitigate these safety concerns while effective also act directly or indirectly on the infused CAR T-cell therapeutic entities.

[0005] In order to address these safety issues pertaining to on-target off-tissue activity of CAR T-cells, and expand the target space amenable to this mode of therapeutics, there is growing emphasis in creating logic gates to modulate T-cell signaling (see Federov V D et al., Sci Transl Med. 2013 Dec. 11; 5 (215): 215ra172).

[0006] One such approach involves using a NOT gate, wherein the T-cell expresses two or more CARs on its cell surface. CARs that provide positive T-cell signals (P-CARs) bind to tumor antigens to enable T-cell activation and/or proliferation and/or cytokine secretion, and/or cytotoxicity mediated by CD3zeta or other immunoreceptor tyrosine-based activation motif (ITAM) containing motifs; while CARs that provide a negative T-cell signal (N-CARs) bind to the off-tissue antigens and attenuate or abrogate the positive signals.

[0007] Therefore under the on-tissue (on-tumor) scenario the T-cell only receives the P-CAR signal and subsequent activation and cytotoxicity and in the off-tissue (off-tumor) scenario the T-cell receives both the P-CAR and N-CAR signals, whereby the latter attenuates or terminates downstream signaling leading to impaired or no activation and cytotoxicity.

[0008] Therefore, there is a need for negative or inhibitory CAR (N-CAR) that can be used to generate a negative signal suitable to prevent off target activation of P-CAR T-cells (T-cells comprising a P-CAR). It would be an additional benefit if such negative signal is short-termed, reversible and sufficient to attenuate or prevent on-target off-tissue activity of CAR T-cells comprising such N-CAR.

### DETAILED DESCRIPTION OF THE INVENTION

### General Techniques

[0009] The practice of the present invention will employ, unless otherwise indicated, conventional techniques of molecular biology (including recombinant techniques), microbiology, cell biology, biochemistry and immunology, which are within the skill of the art. Such techniques are explained fully in the literature, such as, Molecular Cloning: A Laboratory Manual, second edition (Sambrook et al., 1989) Cold Spring Harbor Press; Oligonucleotide Synthesis (M. J. Gait, ed., 1984); Methods in Molecular Biology, Humana Press; Cell Biology: A Laboratory Notebook (J. E. Cellis, ed., 1998) Academic Press; Animal Cell Culture (R. I. Freshney, ed., 1987); Introduction to Cell and Tissue Culture (J. P. Mather and P. E. Roberts, 1998) Plenum Press; Cell and Tissue Culture: Laboratory Procedures (A. Doyle, J. B. Griffiths, and D. G. Newell, eds., 1993-1998) J. Wiley and Sons; Methods in Enzymology (Academic Press, Inc.); Handbook of Experimental Immunology (D. M. Weir and C. C. Blackwell, eds.); Gene Transfer Vectors for Mammalian Cells (J. M. Miller and M. P. Calos, eds., 1987); Current Protocols in Molecular Biology (F. M. Ausubel et al., eds., 1987); PCR: The Polymerase Chain Reaction, (Mullis et al., eds., 1994); Current Protocols in Immunology (J. E. Coligan et al., eds., 1991); Short Protocols in Molecular Biology (Wiley and Sons, 1999); Immunobiology (C. A. Janeway and P. Travers, 1997); Antibodies (P. Finch, 1997); Antibodies: a practical approach (D. Catty., ed., IRL Press, 1988-1989); Monoclonal antibodies: a practical approach (P. Shepherd and C. Dean, eds., Oxford University Press, 2000); Using antibodies: a laboratory manual (E. Harlow and D. Lane (Cold Spring Harbor Laboratory Press, 1999); The Antibodies (M. Zanetti and J. D. Capra, eds., Harwood Academic Publishers, 1995).

### Definitions

[0010] The following terms, unless otherwise indicated, shall be understood to have the following meanings: the term “isolated molecule” as referring to a molecule (where the molecule is, for example, a polypeptide, a polynucleotide, or an antibody) that by virtue of its origin or source of derivation (1) is not associated with naturally associated components that accompany it in its native state, (2) is substantially free of other molecules from the same source, e.g., species, cell from which it is expressed, library, etc., (3) is expressed by a cell from a different species, or (4) does not occur in nature. Thus, a molecule that is chemically synthesized, or expressed in a cellular system different from the system from which it naturally originates, will be “isolated” from its naturally associated components. A molecule also may be rendered substantially free of naturally associated components by isolation, using purification techniques well known in the art. Molecule purity or homogeneity may be assayed by a number of means well known in the art. For example, the purity of a polypeptide sample may be assayed using polyacrylamide gel electrophoresis and staining of the gel to visualize the polypeptide using techniques well known in the art. For certain purposes, higher resolution may be provided by using HPLC or other means well known in the art for purification.

[0011] An “antibody” is an immunoglobulin molecule capable of specific binding to a target, such as a carbohydrate, polynucleotide, lipid, polypeptide, etc., through at least one antigen recognition site, located in the variable region of the immunoglobulin molecule. As used herein, the term encompasses not only intact polyclonal or monoclonal antibodies, but also, unless otherwise specified, any antigen binding portion thereof that competes with the antibody for specific binding, fusion proteins comprising an antigen binding portion, and any other modified configuration of the immunoglobulin molecule that comprises an antigen recognition site. Antigen binding portions include, for example, Fab, Fab′, F(ab′)2, Fd, Fv, domain antibodies (dAbs, e.g., shark and camelid antibodies), fragments including complementarity determining regions (CDRs), single chain variable fragment antibodies (scFv), maxibodies, minibodies, intrabodies, diabodies, triabodies, tetrabodies, v-NAR and bis-scFv, and polypeptides that contain at least a portion of an immunoglobulin that is sufficient to confer specific antigen binding to the polypeptide. An antibody includes an antibody of any class, such as IgG, IgA, or IgM (or sub-class thereof), and the antibody need not be of any particular class. Depending on the antibody amino acid sequence of the constant region of its heavy chains, immunoglobulins can be assigned to different classes. There are five major classes of immunoglobulins: IgA, IgD, IgE, IgG, and IgM, and several of these may be further divided into subclasses (isotypes), e.g., IgG1, IgG2, IgG3, IgG4, IgA1 and IgA2. The heavy-chain constant regions that correspond to the different classes of immunoglobulins are called alpha, delta, epsilon, gamma, and mu, respectively. The subunit structures and three-dimensional configurations of different classes of immunoglobulins are well known.

[0012] A “variable region” of an antibody refers to the variable region of the antibody light chain or the variable region of the antibody heavy chain, either alone or in combination. As known in the art, the variable regions of the heavy and light chains each consist of four framework regions (FRs) connected by three complementarity determining regions (CDRs) also known as hypervariable regions, and contribute to the formation of the antigen binding site of antibodies. If variants of a subject variable region are desired, particularly with substitution in amino acid residues outside of a CDR region (e.g., in the framework region), appropriate amino acid substitution, preferably, conservative amino acid substitution, can be identified by comparing the subject variable region to the variable regions of other antibodies which contain CDR1 and CDR2 sequences in the same canonincal class as the subject variable region (Chothia and Lesk, J Mol Biol 196 (4): 901-917, 1987).

[0013] In certain embodiments, definitive delineation of a CDR and identification of residues comprising the binding site of an antibody is accomplished by solving the structure of the antibody and/or solving the structure of the antibody-ligand complex. In certain embodiments, that can be accomplished by any of a variety of techniques known to those skilled in the art, such as X-ray crystallography. In certain embodiments, various methods of analysis can be employed to identify or approximate the CDR regions. In certain embodiments, various methods of analysis can be employed to identify or approximate the CDR regions. Examples of such methods include, but are not limited to, the Kabat definition, the Chothia definition, the AbM definition, the contact definition, and the conformational definition.

[0014] The Kabat definition is a standard for numbering the residues in an antibody and is typically used to identify CDR regions. Sec, e.g., Johnson & Wu, 2000, Nucleic Acids Res., 28:214-8. The Chothia definition is similar to the Kabat definition, but the Chothia definition takes into account positions of certain structural loop regions. Sec, e.g., Chothia et al., 1986, J. Mol. Biol., 196:901-17; Chothia et al., 1989, Nature, 342:877-83. The AbM definition uses an integrated suite of computer programs produced by Oxford Molecular Group that model antibody structure. Sec, e.g., Martin et al., 1989, Proc Natl Acad Sci (USA), 86:9268-9272; “AbM™, A Computer Program for Modeling Variable Regions of Antibodies,” Oxford, UK; Oxford Molecular, Ltd. The AbM definition models the tertiary structure of an antibody from positive sequence using a combination of knowledge databases and ab initio methods, such as those described by Samudrala et al., 1999, “Ab Initio Protein Structure Prediction Using a Combined Hierarchical Approach,” in PROTEINS, Structure, Function and Genetics Suppl., 3:194-198. The contact definition is based on an analysis of the available complex crystal structures. Sec, e.g., MacCallum et al., 1996, J. Mol. Biol., 5:732-45. In another approach, referred to herein as the “conformational definition” of CDRs, the positions of the CDRs may be identified as the residues that make enthalpic contributions to antigen binding. See, e.g., Makabe et al., 2008, Journal of Biological Chemistry, 283:1156-1166. Still other CDR boundary definitions may not strictly follow one of the above approaches, but will nonetheless overlap with at least a portion of the Kabat CDRs, although they may be shortened or lengthened in light of prediction or experimental findings that particular residues or groups of residues do not significantly impact antigen binding. As used herein, a CDR may refer to CDRs defined by any approach known in the art, including combinations of approaches. The methods used herein may utilize CDRs defined according to any of these approaches. For any given embodiment containing more than one CDR, the CDRs may be defined in accordance with any of Kabat, Chothia, extended, AbM, contact, and/or conformational definitions.

[0015] As known in the art, a “constant region” of an antibody refers to the constant region of the antibody light chain or the constant region of the antibody heavy chain, either alone or in combination.

[0016] As used herein, “monoclonal antibody” refers to an antibody obtained from a population of substantially homogeneous antibodies, i.e., the individual antibodies comprising the population are identical except for possible naturally-occurring mutations that may be present in minor amounts. Monoclonal antibodies are highly specific, being directed against a single antigenic site. Furthermore, in contrast to polyclonal antibody preparations, which typically include different antibodies directed against different determinants (epitopes), each monoclonal antibody is directed against a single determinant on the antigen. The modifier “monoclonal” indicates the character of the antibody as being obtained from a substantially homogeneous population of antibodies, and is not to be construed as requiring production of the antibody by any particular method. For example, the monoclonal antibodies to be used in accordance with the present invention may be made by the hybridoma method first described by Kohler and Milstein, 1975, Nature 256:495, or may be made by recombinant DNA methods such as described in U.S. Pat. No. 4,816,567. The monoclonal antibodies may also be isolated from phage libraries generated using the techniques described in McCafferty et al., 1990, Nature 348:552-554, for example. As used herein, “humanized” antibody refers to forms of non-human (e.g. murine) antibodies that are chimeric immunoglobulins, immunoglobulin chains, or fragments thereof (such as Fv, Fab, Fab′, F(ab′)2 or other antigen-binding subsequences of antibodies) that contain minimal sequence derived from non-human immunoglobulin. Preferably, humanized antibodies are human immunoglobulins (recipient antibody) in which residues from a CDR of the recipient are replaced by residues from a CDR of a non-human species (donor antibody) such as mouse, rat, or rabbit having the desired specificity, affinity, and capacity. The humanized antibody may comprise residues that are found neither in the recipient antibody nor in the imported CDR or framework sequences, but are included to further refine and optimize antibody performance.

[0017] A “human antibody” is one which possesses an amino acid sequence which corresponds to that of an antibody produced by a human and/or has been made using any of the techniques for making human antibodies as disclosed herein. This definition of a human antibody specifically excludes a humanized antibody comprising non-human antigen binding residues.

[0018] The term “chimeric antibody” is intended to refer to antibodies in which the variable region sequences are derived from one species and the constant region sequences are derived from another species, such as an antibody in which the variable region sequences are derived from a mouse antibody and the constant region sequences are derived from a human antibody.

[0019] The term “epitope” refers to that portion of a molecule capable of being recognized by and bound by an antibody at one or more of the antibody's antigen-binding regions. Epitopes often consist of a surface grouping of molecules such as amino acids or sugar side chains and have specific three-dimensional structural characteristics as well as specific charge characteristics. In some embodiments, the epitope can be a protein epitope. Protein epitopes can be linear or conformational. In a linear epitope, all of the points of interaction between the protein and the interacting molecule (such as an antibody) occur linearly along the positive amino acid sequence of the protein. A “nonlinear epitope” or “conformational epitope” comprises noncontiguous polypeptides (or amino acids) within the antigenic protein to which an antibody specific to the epitope binds. The term “antigenic epitope” as used herein, is defined as a portion of an antigen to which an antibody can specifically bind as determined by any method well known in the art, for example, by conventional immunoassays. Once a desired epitope on an antigen is determined, it is possible to generate antibodies to that epitope, e.g., using the techniques described in the present specification. Alternatively, during the discovery process, the generation and characterization of antibodies may elucidate information about desirable epitopes. From this information, it is then possible to competitively screen antibodies for binding to the same epitope. An approach to achieve this is to conduct competition and cross-competition studies to find antibodies that compete or cross-compete with one another for binding to the antigen.

[0020] The term “signaling domain” refers to the functional portion of a protein which acts by transmitting information within the cell to regulate cellular activity via defined signaling pathways by generating second messengers or functioning as effectors by responding to such messengers.

[0021] The term “off-tissue antigen” (or off-tumor antigen) refers to an antigen which is present on non-tumor tissue and not present on the tumor of interest (tumor to be treated by the cells of the invention comprising a P-CAR directed to a tumor antigen and a N-CAR directed to an off-tissue antigen), or only present on the tumor of interest at much lower levels compared to levels of tumor antigen (i.e. the antigen present on the tumor of interest and targeted by the P-CAR).

[0022] The term “anti-tumor effect” refers to a biological effect which can be manifested by various means, including but not limited to, e.g., a decrease in tumor volume, a decrease in the number of tumor cells, a decrease in the number of metastases, an increase in life expectancy, decrease in tumor cell proliferation, decrease in tumor cell survival, or amelioration of various physiological symptoms associated with the cancerous condition. An “anti-tumor effect” can also be manifested by the ability of the cells of the invention in prevention of the occurrence of tumor in the first place.

[0023] The term “autologous” refers to any material derived from the same individual to whom it is later to be re-introduced into the individual.

[0024] The term “allogeneic” refers to any material derived from a different animal of the same species as the individual to whom the material is introduced. Two or more individuals are said to be allogeneic to one another when the genes at one or more loci are not identical. In some aspects, allogeneic material from individuals of the same species may be sufficiently unlike genetically to interact antigenically

[0025] The term “xenogeneic” refers to a graft derived from an animal of a different species.

[0026] The term “cancer” refers to a disease characterized by the rapid and uncontrolled growth of aberrant cells. Cancer cells can spread locally or through the bloodstream and lymphatic system to other parts of the body. Examples of various cancers are described herein and include but are not limited to, breast cancer, prostate cancer, ovarian cancer, cervical cancer, skin cancer, pancreatic cancer, colorectal cancer, renal cell cancer, liver cancer, brain cancer, lymphoma, leukemia, lung cancer and the like.

[0027] The term “conservative sequence modifications” refers to amino acid modifications that do not significantly affect or alter the binding characteristics of the antibody or antibody fragment containing the amino acid sequence. Such conservative modifications include amino acid substitutions, additions and deletions. Modifications can be introduced into an antibody or antibody fragment of the invention by standard techniques known in the art, such as site-directed mutagenesis and PCR-mediated mutagenesis. Conservative amino acid substitutions are ones in which the amino acid residue is replaced with an amino acid residue having a similar side chain. Families of amino acid residues having similar side chains have been defined in the art. These families include amino acids with basic side chains (e.g., lysine, arginine, histidine), acidic side chains (e.g., aspartic acid, glutamic acid), uncharged polar side chains (e.g., glycine, asparagine, glutamine, serine, threonine, tyrosine, cysteine, tryptophan), nonpolar side chains (e.g., alanine, valine, leucine, isoleucine, proline, phenylalanine, methionine), beta-branched side chains (e.g., threonine, valine, isoleucine) and aromatic side chains (e.g., tyrosine, phenylalanine, tryptophan, histidine). Thus, one or more amino acid residues within a CAR of the invention can be replaced with other amino acid residues from the same side chain family and the altered CAR can be tested using the functional assays described herein.

[0028] In some embodiments, the “fragment” of a sequence of amino acids is shorter than said sequence of amino acid. In some embodiments, the fragment of a sequence of amino acids is at least 1%, 5% 10%, 20%, 40%, 50%, 60%, 70%, 80% or 90% shorter than said sequence of amino acids. In some embodiments, the fragment of a sequence of amino acids is shorter by at least 1, 5, 10, 20, 50, 100, 200, 300 amino acids as compared to said sequence of amino acids.

[0029] Unless otherwise specified, the left to right orientation of amino acid sequences or formula representing amino acid sequences are disclosed using the conventional left to right orientation N-Term to C-term.

[0030] N-terminal flanking region of a domain refers to the sequence of amino acid which is directly adjacent to the N-terminal amino acid of said domain. C-terminal flanking region of a domain refers to the sequence of amino acid which is directly adjacent to the C-terminal amino acid of said domain. For example, in the sequence seq1-ITIM-seq2, seq1 is the N-terminal flanking region of the ITIM intracellular domain and seq2 N-terminal flanking region of the ITIM intracellular domain. In another example, the naturally occurring N-terminal flanking region of ITIM.*ITSM intracellular domains is the sequence of amino acid which is directly adjacent to the N-terminal amino acid of the ITIM motif of the ITIM.*ITSM intracellular domain. In another example, the naturally occurring C-terminal flanking region of ITIM.*ITSM intracellular domain is the sequence of amino acid which is directly adjacent to the C-terminal amino acid of the ITSM motif of the ITIM.*ITSM intracellular domain.

[0031] In another example, the naturally occurring N-terminal flanking region of an ITIM only intracellular domain is the sequence of amino acid which is directly adjacent to the N-terminal amino acid of the ITIM of the ITIM only intracellular domain. In another example, the naturally occurring C-terminal flanking region of an ITIM only intracellular domain is the sequence of amino acid which is directly adjacent to the C-terminal amino acid of the ITIM of the ITIM only intracellular domain.

[0032] In another example, the naturally occurring N-terminal flanking region of an ITSM only intracellular domain is the sequence of amino acid which is directly adjacent to the N-terminal amino acid of the ITSM of the ITSM only intracellular domain. In another example, the naturally occurring C-terminal flanking region of an ITSM only intracellular domain is the sequence of amino acid which is directly adjacent to the C-terminal amino acid of the ITSM of the ITSM only intracellular domain.

[0033] The term “stimulation,” refers to a positive response induced by binding of a stimulatory molecule (e.g., a TCR/CD3 complex) with its cognate ligand thereby mediating a signal transduction event, such as, but not limited to, signal transduction via the TCR/CD3 complex. Stimulation can mediate altered expression of certain molecules, such as downregulation of TGF-β, and/or reorganization of cytoskeletal structures, and the like.

[0034] The term “antigen presenting cell” or “APC” refers to an immune system cell such as an accessory cell (e.g., a B-cell, a dendritic cell, and the like) that displays a foreign antigen complexed with major histocompatibility complexes (MHC's) on its surface. T-cells may recognize these complexes using their T-cell receptors (TCRs). APCs process antigens and present them to T-cells.

[0035] An “intracellular signaling domain,” as the term is used herein, refers to an intracellular portion of a molecule.

[0036] The term “encoding” refers to the inherent property of specific sequences of nucleotides in a polynucleotide, such as a gene, a cDNA, or an mRNA, to serve as templates for synthesis of other polymers and macromolecules in biological processes having either a defined sequence of nucleotides (e.g., rRNA, tRNA and mRNA) or a defined sequence of amino acids and the biological properties resulting therefrom. Thus, a gene, cDNA, or RNA, encodes a protein if transcription and translation of mRNA corresponding to that gene produces the protein in a cell or other biological system. Both the coding strand, the nucleotide sequence of which is identical to the mRNA sequence and is usually provided in sequence listings, and the non-coding strand, used as the template for transcription of a gene or cDNA, can be referred to as encoding the protein or other product of that gene or cDNA.

[0037] Unless otherwise specified, a “nucleotide sequence encoding an amino acid sequence” includes all nucleotide sequences that are degenerate versions of each other and that encode the same amino acid sequence. The phrase nucleotide sequence that encodes a protein or a RNA may also include introns to the extent that the nucleotide sequence encoding the protein may in some version contain an intron(s).

[0038] The term “effective amount” or “therapeutically effective amount” are used interchangeably herein, and refer to an amount of a compound, formulation, material, or composition, as described herein effective to achieve a particular biological result.

[0039] The term “endogenous” refers to any material from or produced inside an organism, cell, tissue or system.

[0040] The term “exogenous” refers to any material introduced from or produced outside an organism, cell, tissue or system.

[0041] The term “expression” refers to the transcription and/or translation of a particular nucleotide sequence driven by a promoter.

[0042] The term “transfer vector” refers to a composition of matter which comprises an isolated nucleic acid and which can be used to deliver the isolated nucleic acid to the interior of a cell. Numerous vectors are known in the art including, but not limited to, linear polynucleotides, polynucleotides associated with ionic or amphiphilic compounds, plasmids, and viruses. Thus, the term “transfer vector” includes an autonomously replicating plasmid or a virus. The term should also be construed to further include non-plasmid and non-viral compounds which facilitate transfer of nucleic acid into cells, such as, for example, a polylysine compound, liposome, and the like. Examples of viral transfer vectors include, but are not limited to, adenoviral vectors, adeno-associated virus vectors, retroviral vectors, lentiviral vectors, and the like.

[0043] The term “expression vector” refers to a vector comprising a recombinant polynucleotide comprising expression control sequences operatively linked to a nucleotide sequence to be expressed. An expression vector comprises sufficient cis-acting elements for expression; other elements for expression can be supplied by the host cell or in an in vitro expression system. Expression vectors include all those known in the art, including cosmids, plasmids (e.g., naked or contained in liposomes) and viruses (e.g., lentiviruses, retroviruses, adenoviruses, and adeno-associated viruses) that incorporate the recombinant polynucleotide.

[0044] The term “lentivirus” refers to a genus of the Retroviridae family. Lentiviruses are unique among the retroviruses in being able to infect non-dividing cells; they can deliver a significant amount of genetic information into the DNA of the host cell, so they are one of the most efficient methods of a gene delivery vector. HIV, SIV, and FIV are all examples of lentiviruses.

[0045] The term “lentiviral vector” refers to a vector derived from at least a portion of a lentivirus genome, including especially a self-inactivating lentiviral vector as provided in Milone et al., Mol. Ther. 17 (8): 1453-1464 (2009). Other examples of lentivirus vectors that may be used in the clinic, include but are not limited to, e.g., the LENTIVECTOR® gene delivery technology from Oxford BioMedica, the LENTIMAX™ vector system from Lentigen and the like. Nonclinical types of lentiviral vectors are also available and would be known to one skilled in the art.

[0046] The term “homologous” or “identity” refers to the subunit sequence identity between two polymeric molecules, e.g., between two nucleic acid molecules, such as, two DNA molecules or two RNA molecules, or between two polypeptide molecules. When a subunit position in both of the two molecules is occupied by the same monomeric subunit; e.g., if a position in each of two DNA molecules is occupied by adenine, then they are homologous or identical at that position. The homology between two sequences is a direct function of the number of matching or homologous positions; e.g., if half (e.g., five positions in a polymer ten subunits in length) of the positions in two sequences are homologous, the two sequences are 50% homologous; if 90% of the positions (e.g., 9 of 10), are matched or homologous, the two sequences are 90% homologous.

[0047] The term “operably linked” or “transcriptional control” refers to functional linkage between a regulatory sequence and a heterologous nucleic acid sequence resulting in expression of the latter. For example, a first nucleic acid sequence is operably linked with a second nucleic acid sequence when the first nucleic acid sequence is placed in a functional relationship with the second nucleic acid sequence. For instance, a promoter is operably linked to a coding sequence if the promoter affects the transcription or expression of the coding sequence. Operably linked DNA sequences can be contiguous with each other and, e.g., where necessary to join two protein coding regions, are in the same reading frame.

[0048] The terms “polypeptide”, “oligopeptide”, “peptide” and “protein” are used interchangeably herein to refer to chains of amino acids of any length. The chain may be linear or branched, it may comprise modified amino acids, and/or may be interrupted by non-amino acids. The terms also encompass an amino acid chain that has been modified naturally or by intervention; for example, disulfide bond formation, glycosylation, lipidation, acetylation, phosphorylation, or any other manipulation or modification, such as conjugation with a labeling component. Also included within the definition are, for example, polypeptides containing one or more analogs of an amino acid (including, for example, unnatural amino acids, etc.), as well as other modifications known in the art. It is understood that the polypeptides can occur as single chains or associated chains.

[0049] As known in the art, “polynucleotide,” or “nucleic acid,” as used interchangeably herein, refer to chains of nucleotides of any length, and include DNA and RNA. The nucleotides can be deoxyribonucleotides, ribonucleotides, modified nucleotides or bases, and/or their analogs, or any substrate that can be incorporated into a chain by DNA or RNA polymerase. A polynucleotide may comprise modified nucleotides, such as methylated nucleotides and their analogs. If present, modification to the nucleotide structure may be imparted before or after assembly of the chain. The sequence of nucleotides may be interrupted by non-nucleotide components. A polynucleotide may be further modified after polymerization, such as by conjugation with a labeling component. Other types of modifications include, for example, “caps”, substitution of one or more of the naturally occurring nucleotides with an analog, internucleotide modifications such as, for example, those with uncharged linkages (e.g., methyl phosphonates, phosphotriesters, phosphoamidates, carbamates, etc.) and with charged linkages (e.g., phosphorothioates, phosphorodithioates, etc.), those containing pendant moieties, such as, for example, proteins (e.g., nucleases, toxins, antibodies, signal peptides, poly-L-lysine, etc.), those with intercalators (e.g., acridine, psoralen, etc.), those containing chelators (e.g., metals, radioactive metals, boron, oxidative metals, etc.), those containing alkylators, those with modified linkages (e.g., alpha anomeric nucleic acids, etc.), as well as unmodified forms of the polynucleotide(s). Further, any of the hydroxyl groups ordinarily present in the sugars may be replaced, for example, by phosphonate groups, phosphate groups, protected by standard protecting groups, or activated to prepare additional linkages to additional nucleotides, or may be conjugated to solid supports. The 5′ and 3′ terminal OH can be phosphorylated or substituted with amines or organic capping group moieties of from 1 to 20 carbon atoms. Other hydroxyls may also be derivatized to standard protecting groups. Polynucleotides can also contain analogous forms of ribose or deoxyribose sugars that are generally known in the art, including, for example, 2′-O-methyl-, 2′-O-allyl, 2′-fluoro- or 2′-azido-ribose, carbocyclic sugar analogs, alpha- or beta-anomeric sugars, epimeric sugars such as arabinose, xyloses or lyxoses, pyranose sugars, furanose sugars, sedoheptuloses, acyclic analogs and abasic nucleoside analogs such as methyl riboside. One or more phosphodiester linkages may be replaced by alternative linking groups. These alternative linking groups include, but are not limited to, embodiments wherein phosphate is replaced by P(O)S(“thioate”), P(S) S (“dithioate”), (O) NR₂ (“amidate”), P(O)R, P(O) OR′, CO or CH₂ (“formacetal”), in which each R or R′ is independently H or substituted or unsubstituted alkyl (1-20 C) optionally containing an ether (—O—) linkage, aryl, alkenyl, cycloalkyl, cycloalkenyl or araldyl. Not all linkages in a polynucleotide need be identical. The preceding description applies to all polynucleotides referred to herein, including RNA and DNA.

[0050] An antibody that “preferentially binds” or “specifically binds” (used interchangeably herein) to an epitope is a term well understood in the art, and methods to determine such specific or preferential binding are also well known in the art. A molecule is said to exhibit “specific binding” or “preferential binding” if it reacts or associates more frequently, more rapidly, with greater duration and/or with greater affinity with a particular cell or substance than it does with alternative cells or substances. An antibody “specifically binds” or “preferentially binds” to a target if it binds with greater affinity, avidity, more readily, and/or with greater duration than it binds to other substances.

[0051] A “host cell” includes an individual cell or cell culture that can be or has been a recipient for vector(s) for incorporation of polynucleotide inserts. Host cells include progeny of a single host cell, and the progeny may not necessarily be completely identical (in morphology or in genomic DNA complement) to the original parent cell due to natural, accidental, or deliberate mutation. A host cell includes cells transfected in vivo with a polynucleotide(s) of this invention.

[0052] The term “compete”, as used herein with regard to an antibody, means that a first antibody, or an antigen-binding portion thereof, binds to an epitope in a manner sufficiently similar to the binding of a second antibody, or an antigen-binding portion thereof, such that the result of binding of the first antibody with its cognate epitope is detectably decreased in the presence of the second antibody compared to the binding of the first antibody in the absence of the second antibody. The alternative, where the binding of the second antibody to its epitope is also detectably decreased in the presence of the first antibody, can, but need not be the case. That is, a first antibody can inhibit the binding of a second antibody to its epitope without that second antibody inhibiting the binding of the first antibody to its respective epitope. However, where each antibody detectably inhibits the binding of the other antibody with its cognate epitope or ligand, whether to the same, greater, or lesser extent, the antibodies are said to “cross-compete” with each other for binding of their respective epitope(s). Both competing and cross-competing antibodies are encompassed by the present invention. Regardless of the mechanism by which such competition or cross-competition occurs (e.g., steric hindrance, conformational change, or binding to a common epitope, or portion thereof), the skilled artisan would appreciate, based upon the teachings provided herein, that such competing and/or cross-competing antibodies are encompassed and can be useful for the methods disclosed herein.

[0053] As used herein, “treatment” is an approach for obtaining beneficial or desired clinical results.

[0054] As used herein, an “effective dosage” or “effective amount” of drug, compound, or pharmaceutical composition is an amount sufficient to effect any one or more beneficial or desired results. For prophylactic use, beneficial or desired results include eliminating or reducing the risk, lessening the severity, or delaying the outset of the disease, including biochemical, histological and/or behavioral symptoms of the disease, its complications and intermediate pathological phenotypes presenting during development of the disease. For therapeutic use, beneficial or desired results include clinical results such as reducing incidence or amelioration of one or more symptoms of various diseases or conditions (such as, for example without limitation, renal cell, gastric, head and neck, lung, ovarian, and pancreatic cancers), decreasing the dose of other medications required to treat the disease, enhancing the effect of another medication, and/or delaying the progression of the disease. An effective dosage can be administered in one or more administrations. For purposes of this invention, an effective dosage of drug, compound, or pharmaceutical composition is an amount sufficient to accomplish prophylactic or therapeutic treatment either directly or indirectly. As is understood in the clinical context, an effective dosage of a drug, compound, or pharmaceutical composition may or may not be achieved in conjunction with another drug, compound, or pharmaceutical composition. Thus, an “effective dosage” may be considered in the context of administering one or more therapeutic agents, and a single agent may be considered to be given in an effective amount if, in conjunction with one or more other agents, a desirable result may be or is achieved.

[0055] An “individual” or a “subject” is a mammal, more preferably, a human. Mammals also include, but are not limited to, farm animals, sport animals, pets, primates, horses, dogs, cats, mice and rats.

[0056] As used herein, “vector” means a construct, which is capable of delivering, and, preferably, expressing, one or more gene(s) or sequence(s) of interest in a host cell. Examples of vectors include, but are not limited to, viral vectors, naked DNA or RNA expression vectors, plasmid, cosmid or phage vectors, DNA or RNA expression vectors associated with cationic condensing agents, DNA or RNA expression vectors encapsulated in liposomes, and certain eukaryotic cells, such as producer cells.

[0057] As used herein, “expression control sequence” means a nucleic acid sequence that directs transcription of a nucleic acid. An expression control sequence can be a promoter, such as a constitutive or an inducible promoter, or an enhancer. The expression control sequence is operably linked to the nucleic acid sequence to be transcribed.

[0058] The term “promoter” refers to a DNA sequence recognized by the synthetic machinery of the cell, or introduced synthetic machinery, required to initiate the specific transcription of a polynucleotide sequence.

[0059] The term “promoter/regulatory sequence” refers to a nucleic acid sequence which is required for expression of a gene product operably linked to the promoter/regulatory sequence. In some instances, this sequence may be the core promoter sequence and in other instances, this sequence may also include an enhancer sequence and other regulatory elements which are required for expression of the gene product. The promoter/regulatory sequence may, for example, be one which expresses the gene product in a tissue specific manner.

[0060] The term “constitutive” promoter refers to a nucleotide sequence which, when operably linked with a polynucleotide which encodes or specifies a gene product, causes the gene product to be produced in a cell under most or all physiological conditions of the cell.

[0061] The term “inducible” promoter refers to a nucleotide sequence which, when operably linked with a polynucleotide which encodes or specifies a gene product, causes the gene product to be produced in a cell substantially only when an inducer which corresponds to the promoter is present in the cell.

[0062] The term “tissue-specific” promoter refers to a nucleotide sequence which, when operably linked with a polynucleotide encodes or specified by a gene, causes the gene product to be produced in a cell substantially only if the cell is a cell of the tissue type corresponding to the promoter.

[0063] The term “flexible polypeptide linker” or “linker” as used in the context of a scFv refers to a peptide linker that consists of amino acids such as glycine and/or serine residues used alone or in combination, to link variable heavy and variable light chain regions together. In one embodiment, the flexible polypeptide linker is a Glycine/Serine linker and comprises the amino acid sequence (Gly-Gly-Gly-Ser), or (Gly-Gly-Gly-Gly-Ser), where n is a positive integer equal to or greater than 1. For example, n=1, n=2, n=3, n=4, n=5, n=6, n=7, n=8, n=9 and n=10. In one embodiment, the flexible polypeptide linkers include, but are not limited to, (Gly₄Ser)₄ or (Gly₄Ser)₃. In another embodiment, the linkers include multiple repeats of (GlyₓSer)ₙ, where x=1, 2, 3, 4 or 5 and n is 1, 2, 3, 4, 5, 6, 7, 8, 9 or 10, such as multiple repeat of (GlySer), (Gly₂Ser) or (Gly₅Ser). Also included within the scope of the invention are linkers described in WO2012/138475, incorporated herein by reference.

[0064] As used herein, a 5′ cap (also termed an RNA cap, an RNA 7-methylguanosine cap or an RNA m G cap) is a modified guanine nucleotide that has been added to the “front” or 5′ end of a eukaryotic messenger RNA shortly after the start of transcription. The 5′ cap consists of a terminal group which is linked to the first transcribed nucleotide. Its presence is critical for recognition by the ribosome and protection from RNases. Cap addition is coupled to transcription, and occurs co-transcriptionally, such that each influences the other. Shortly after the start of transcription, the 5′ end of the mRNA being synthesized is bound by a cap-synthesizing complex associated with RNA polymerase. This enzymatic complex catalyzes the chemical reactions that are required for mRNA capping. Synthesis proceeds as a multi-step biochemical reaction. The capping moiety can be modified to modulate functionality of mRNA such as its stability or efficiency of translation.

[0065] As used herein, “in vitro transcribed RNA” refers to RNA, preferably mRNA, that has been synthesized in vitro. Generally, the in vitro transcribed RNA is generated from an in vitro transcription vector. The in vitro transcription vector comprises a template that is used to generate the in vitro transcribed RNA.

[0066] As used herein, a “poly(A)” is a series of adenosines attached by polyadenylation to the mRNA. In the preferred embodiment of a construct for transient expression, the polyA is between 50 and 5000, preferably greater than 64, more preferably greater than 100, most preferably greater than 300 or 400. poly(A) sequences can be modified chemically or enzymatically to modulate mRNA functionality such as localization, stability or efficiency of translation.

[0067] As used herein, “polyadenylation” refers to the covalent linkage of a polyadenylyl moiety, or its modified variant, to a messenger RNA molecule. In eukaryotic organisms, most messenger RNA (mRNA) molecules are polyadenylated at the 3′ end. The 3′ poly(A) tail is a long sequence of adenine nucleotides (often several hundred) added to the pre-mRNA through the action of an enzyme, polyadenylate polymerase. In higher eukaryotes, the poly(A) tail is added onto transcripts that contain a specific sequence, the polyadenylation signal. The poly(A) tail and the protein bound to it aid in protecting mRNA from degradation by exonucleases. Polyadenylation is also important for transcription termination, export of the mRNA from the nucleus, and translation. Polyadenylation occurs in the nucleus immediately after transcription of DNA into RNA, but additionally can also occur later in the cytoplasm. After transcription has been terminated, the mRNA chain is cleaved through the action of an endonuclease complex associated with RNA polymerase. The cleavage site is usually characterized by the presence of the base sequence AAUAAA near the cleavage site. After the mRNA has been cleaved, adenosine residues are added to the free 3′ end at the cleavage site.

[0068] As used herein, “transient” refers to expression of a non-integrated transgene for a period of hours, days or weeks, wherein the period of time of expression is less than the period of time for expression of the gene if integrated into the genome or contained within a stable plasmid replicon in the host cell.

[0069] The term “signal transduction pathway” refers to the biochemical relationship between a variety of signal transduction molecules that play a role in the transmission of a signal from one portion of a cell to another portion of a cell. The phrase “cell surface receptor” includes molecules and complexes of molecules capable of receiving a signal and transmitting signal across the membrane of a cell.

[0070] Reference to “about” a value or parameter herein includes (and describes) embodiments that are directed to that value or parameter per se. For example, description referring to “about X” includes description of “X.” Numeric ranges are inclusive of the numbers defining the range.

[0071] It is understood that wherever embodiments are described herein with the language “comprising,” otherwise analogous embodiments described in terms of “consisting of” and/or “consisting essentially of” are also provided.

[0072] Where aspects or embodiments of the invention are described in terms of a Markush group or other grouping of alternatives, the present invention encompasses not only the entire group listed as a whole, but each member of the group individually and all possible subgroups of the main group, but also the main group absent one or more of the group members. The present invention also envisages the explicit exclusion of one or more of any of the group members in the claimed invention.

[0073] Unless otherwise defined, all technical and scientific terms used herein have the same meaning as commonly understood by one of ordinary skill in the art to which this invention belongs. In case of conflict, the present specification, including definitions, will control. Throughout this specification and claims, the word “comprise,” or variations such as “comprises” or “comprising” will be understood to imply the inclusion of a stated integer or group of integers but not the exclusion of any other integer or group of integers. Unless otherwise required by context, singular terms shall include pluralities and plural terms shall include the singular. Any example(s) following the term “e.g.” or “for example” is not meant to be exhaustive or limiting. Exemplary methods and materials are described herein, although methods and materials similar or equivalent to those described herein can also be used in the practice or testing of the present invention. The materials, methods, and examples are illustrative only and not intended to be limiting.

### DESCRIPTION OF FIGURES

[0074] FIGS. 1 and 2 show the dual cell surface expression of P-CAR1 and various N-CARs assessed by multicolor flow cytometry in transduced NFAT-luciferase reporter Jurkat cells.

[0075] FIGS. 3 and 4 show the dual cell surface expression of P-CAR1 and various N-CARs assessed by multicolor flow cytometry in transduced NFkB-luciferase reporter Jurkat cells. In FIGS. 1 to 4, P-CAR expression was detected using a recombinant human CD19-mouse IgG Fc fusion protein followed by APC-conjugated F(ab′)2 goat anti-mouse Fcγ (shown on x axis), and N-CAR expression was detected with a biotinylated recombinant human PSMA-human IgG1 Fc fusion protein followed by PE-conjugated streptavidin (y axis).

[0076] FIGS. 5A, 5B and 5C show the inhibitory effect of various N-CARs on P-CAR1 induced T cell activation. Control ΔPD1- or test N-CAR-transduced luciferase reporter Jurkat cells expressing P-CAR1 were incubated with either CD19-expressing AAPCs or dual CD19+PSMA-expressing AAPCs, and luciferase activity was assessed 16 h later. Data are expressed as a ratio of the mean RLU from co-culture with CD19+PSMA AAPCs/CD19 AAPCs. n=6 replicates per sample; data shown are the means+/−95% CI). FIGS. 5A/5C and 5B show results using NFAT-luciferase reporter and NFkB-luciferase reporter Jurkat cells, respectively.

[0077] FIGS. 6 and 7 show the dual cell surface expression of P-CAR2 and and N-CARs listed in Table 10 assessed by multicolor flow cytometry in transduced NFAT-luciferase reporter Jurkat cells. FIGS. 8 and 9 show the dual cell surface expression of P-CAR2 and N-CARs listed in Table 10 assessed by multicolor flow cytometry in transduced NFkB-luciferase reporter Jurkat cells. In FIGS. 6 to 9, P-CAR expression was detected using a recombinant human CD19-mouse IgG Fc fusion protein followed by APC-conjugated F(ab′)2 goat anti-mouse Fcγ (shown on x axis), and N-CAR expression was detected with a biotinylated recombinant human PSMA-human IgG1 Fc fusion protein followed by PE-conjugated streptavidin (y axis).

[0078] FIGS. 10A and 10B show the inhibitory effect of various N-CARs on P-CAR2 induced T cell activation. Control ΔPD1- or test N-CAR-transduced luciferase reporter Jurkat cells expressing P-CAR2 were incubated with either CD19-expressing or dual PSMA/CD19-expressing AAPCs, and luciferase activity was assessed 16 h later. Data are expressed as a ratio of the mean RLU from co-culture with CD19+PSMA AAPCs/CD19 AAPCs. n=6 replicates per sample; data shown are the means+/−95% CI. FIGS. 10A and 10B show results using NFAT-luciferase reporter and NFkB-luciferase reporter Jurkat cells, respectively.

### DETAILED DESCRIPTION

[0079] The invention relates to a negative signal (or inhibitory) chimeric antigen receptor (N-CAR) comprising
[0080] an extracellular domain comprising an antigen binding domain,
[0081] a transmembrane domain, and,
[0082] an intracellular domain
[0083] wherein the intracellular domain comprises an Immunoreceptor Tyrosine-based Switch Motif ITSM, wherein said ITSM is a sequence of amino acid TX₁YX₂X₃X₄, wherein
[0084] X₁ is an amino acid,
[0085] X₂ is an amino acid,
[0086] X₃ is an amino acid, and,
[0087] X₄ is V or I.

[0088] In some embodiments the term amino acid refers to a natural amino acid. In some embodiments, the term amino acid refer to an amino acid selected from glycine, alanine, valine, leucine, isoleucine, phenylalanine, proline, serine, threonine, tyrosine, cysteine, methionine, lysine, arginine, histidine, tryptophan, aspartic acid, glutamic acid, asparagine or glutamine.

[0089] In some embodiments, when the extracellular domain is a scFv against PSMA, then the intracellular domain is not the intracellular domain of human PD-1.

[0090] In some embodiments, the intracellular domain is not the intracellular domain of human PD-1.

[0091] In some embodiments, the intracellular domain is not the intracellular domain of human BTLA.

[0092] In some embodiments, the intracellular domain is not the intracellular domain of human CD244.

[0093] In some embodiments, the intracellular domain is not SEQ ID No 2000, SEQ ID No 2001 or SEQ ID No 2002.

[0094] In some embodiments, the extracellular domain does not bind to PMSA.

[0095] In some embodiments, the intracellular domain does not comprise the full intracellular domain of PD-1.

[0096] In some embodiments, the ITSM is not TEYATI.

[0097] The intracellular domain or region of the N-CAR includes an inhibitory intracellular signaling domain. An inhibitory intracellular signaling domain is generally responsible for inactivation of the signal from a positive intracellular signaling domain from a P-CAR on the same immune cell in which the N-CAR has been introduced, thereby blocking activation of a normal effector function of the immune cell. The term “effector function” refers to a specialized function of a cell. Effector function of a T-cell, for example, may be cytolytic activity or helper activity including the secretion of cytokines.

### Intracellular Domain of the N-CAR

[0098] In some embodiments, the intracellular domain comprises the following sequence:
[0099] ((L1-ITIM-L2)ⁿ-(L3-ITSM-L4)^{m})^{p}, wherein
[0100] n is 0, 1 or an integer greater than 1;
[0101] m is 1 or an integer greater than 1;
[0102] p is 1 or an integer greater than 1;
[0103] L1 is absent or comprises one or more, preferably one, sequences selected from the group consisting of:
   [0104] (a) a naturally occurring N-terminal flanking region of an ITIM only intracellular domain or a fragment thereof such as, for example, any of the sequences shown in Table 3 below or a fragment thereof;
   [0105] (b) a naturally occurring N-terminal flanking region of an ITIM.*ITSM intracellular domain or a fragment thereof, such as, for example, any of the sequences shown in Table 1 below or a fragment thereof;
   [0106] (c) a naturally occurring intracellular domain from a known inhibitory receptor such as any of the sequences shown in table 2 or a fragment thereof, wherein said intracellular domain is N-terminally flanking to a sequence in (b) above; and
   [0107] (d) a non-naturally occurring sequence comprising between 1 and 500 amino acids; each of L2 and L3 is absent or comprises one or more, preferably one, sequences selected from the group consisting of:
   [0108] (e) a naturally occurring C-terminal flanking region of an ITIM only intracellular domain, such as, for example, any of the sequences shown in Table 4 below or a fragment thereof;
   [0109] (f) a naturally occurring N-terminal flanking region of an ITSM only intracellular domain such as, for example, any of the sequences shown in Table 6 below or a fragment thereof;
   [0110] (g) a naturally occurring intracellular domain between ITIM and ITSM from proteins that have ITIM.*ITSM motif such as, for example, any of the sequences shown in Table 5 below or a fragment thereof;
   [0111] (h) a naturally occurring intracellular domain from a known inhibitory receptor such as any of the sequences shown in table 2 or a fragment thereof, wherein said intracellular domain is N-terminally flanking to a sequence in (f) or (g) above; and
   [0112] (i) a non-naturally occurring sequence comprising between 1 and 500 amino acids; and
[0113] L4 is absent or comprises one or more, preferably one, sequences selected from the group consisting of:
   [0114] (j) a naturally occurring C-terminal flanking region of an ITIM.*ITSM intracellular domain or a fragment thereof such as, for example, any of the sequences shown in Table 7 below or a fragment thereof;
   [0115] (k) a naturally occurring C-terminal flanking region of an ITSM only intracellular domain such as, for example, any of the sequences shown in Table 8 below or a fragment thereof;
   [0116] (l) a naturally occurring intracellular domain from a known inhibitory receptor such as any of the sequences shown in table 2 or a fragment thereof wherein said intracellular domain is C-terminally flanking to a sequence in (j) or (k) above; and
   [0117] (m) a non-naturally occurring sequence comprising between 1 and 500 amino acids, and, wherein,
[0118] the ITIM is the sequence X₅X₆YX₇X₈X₉, wherein
[0119] X₅ is S, V, I or L,
[0120] X₆ is an amino acid,
[0121] X₇ is an amino acid,
[0122] X₈ is an amino acid, and,
[0123] X₉ is V, I or L, and,
[0124] the ITSM is the sequence TX₁YX₂X₃X₄, wherein
[0125] X₁ is an amino acid,
[0126] X₂ is an amino acid,
[0127] X₃ is an amino acid, and,
[0128] X₄ is V or I,
[0129] or a variant thereof.

[0130] In some embodiments, the known inhibitory receptor refers to an inhibitory receptor comprising an extracellular domain, a transmembrane domain and an intracellular domain which do not comprise any ITIM or ITSM and which provides a negative signal able to reduce the activation signal provided by the TCR/CD3 complex in a T-cell.

[0131] In some embodiments, the known inhibitory receptor refers to an inhibitory receptor comprising an extracellular domain, a transmembrane domain and an intracellular domain which provide a negative signal able to reduce the activation signal provided by the TCR/CD3 complex in a T-cell.

[0132] In some embodiments, the known inhibitory receptor is selected from CTLA4, LAG3 HAVCR2 (TIM3), KIR2DL2, LILRB1, TIGIT, CEACAM1, CSFIR, CD5, CD96, CD22 and LAIR1. In a preferred embodiment, the known inhibitory receptor is KIR2DL2.

[0133] ITIM.*ITSM intracellular domain refers to a domain comprising one ITIM and one ITSM. ITSM only intracellular domain refers to a domain comprising one ITSM and no ITIM. ITIM only intracellular domain refers to a domain comprising one ITIM and no ITSM.

[0134] When one or more of n, m or p are greater than 1, each occurrence of L1, L2, L3, L4, ITIM and ITSM is selected independently from the other. For example, the intracellular domain of the N-CAR may comprise several ITSM having different sequences.

[0135] In some embodiments, L1 is absent or comprises one or more, preferably one, sequences selected from the group consisting of:
[0136] (a) a naturally occurring N-terminal flanking region of ITIM only intracellular domains selected from

YKMYGSEMLHKRDPLDEDEDTD
DHWALTQRTARAVSPQSTKPMAES
CSRAARGTIGARRTGQPLKEDPSAVPVFS
HRQNQIKQGPPRSKDEEQKPQQRPDLAVDVLERTADKATVNGLPEKDRET
DTSALAAGSSQE
KTHRRKAARTAVGRNDTHPTTGSASPKHQKKSKLHGPTETSSCSGAAPTV
EMDEE
LTRKKKALRIHSVEGDLRRKSAGQEEWSPSAPSPPGSCVQAEAAPAGLCG
EQRGEDCAELHDYFNV
KCYFLRKAKAKQMPVEMSRPAVPLLNSNNEKMSDPNMEANSHYGHNDDVR
NHAMKPINDNKEPLNSD
RRHQGKQNELSDTAGREINLVDAHLKSEQTEASTRQNSQVLLSETGIYDN
DPDLCFRMQEGSEVYSNPCLEENKPG
WRMMKYQQKAAGMSPEQVLQPLEGDLCYADLTLQLAGTSPQKATTKLSSA
QVDQVEVEYVTMASLPKED
KRVQETKFGNAFTEEDSELVVNYIAKKSFCRRAIELTLHSLGVSEELQNK
LEDVVIDRNLLILGKILGEGEFGSVMEGNLKQEDGTSLKVAVKTMKLDNS
SQREIEEFLSEAACMKDFSHPNVIRLLGVCIEMSSQGIPKPMVILPFMKY
GDLHTY

[0137] (b) a naturally occurring N-terminal flanking region of ITIM.*ITSM intracellular domains selected from

YKMYGSEMLHKRDPLDEDEDTD
WRMMKYQQKAAGMSPEQVLQPLEGD
CSRAARGTIGARRTGQPLKEDPSAVPVFS
RIRQKKAQGSTSSTRLHEPEKNAREITQDTND
KTHRRKAARTAVGRNDTHPTTGSASPKHQKKSKLHGPTETSSCSGAAPTV
EMDEE
KCYFLRKAKAKQMPVEMSRPAVPLLNSNNEKMSDPNMEANSHYGHNDDVR
NHAMKPINDNKEPLNSD
RRHQGKQNELSDTAGREINLVDAHLKSEQTEASTRQNSQVLLSETGIYDN
DPDLCFRMQEGSEVYSNPCLEENKPG
KRVQETKFGNAFTEEDSELVVNYIAKKSFCRRAIELTLHSLGVSEELQNK
LEDVVIDRNLLILGKILGEGEFGSVMEGNLKQEDGTSLKVAVKTMKLDNS
SQREIEEFLSEAACMKDFSHPNVIRLLGVCIEMSSQGIPKPMVILPFMKY
GDLHTY

[0138] (c) a naturally occurring intracellular domain from a known inhibitory receptor selected from the sequences shown in table 2, wherein said intracellular domain is N-terminally flanking to a sequence in (b) above; and
[0139] (d) a non-naturally occurring sequence comprising between 1 and 500 amino acids.

[0140] In some embodiments, each of L2 and L3 is absent or comprises one or more, preferably one, sequences selected from the group consisting of:
[0141] (e) a naturally occurring C-terminal flanking region of ITIM only intracellular domains selected from;

GNCSFFTETG
NFHGMNPSKDTSTEYSEVRTQ
KEEEMADTSYGTVKAENIIMMETAQTSL
NHSVIGPNSRLARNVKEAPTEYASICVRS
DHWALTQRTARAVSPQSTKPMAESITYAAVARH
QVSSAESHKDLGKKDTETVYSEVRKAVPDAVESRYSRTEGSLDGT
DFQWREKTPEPPVPCVPEQTEYATIVFPSGMGTSSPARRGSADGPRSAQP
LRPEDGHCSWPL
NLPKGKKPAPQAAEPNNHTEYASIQTSPQPASEDTLTYADLDMVHLNRTP
KQPAPKPEPSFSEYASVQVPRK
TLQLAGTSPQKATTKLSSAQVDQVEVEYVTMASLPKEDISYASLTLGAED
QEPTYCNMGHLSSHLPGRGPEEPTEYSTISRP
ETGPKHIPLQTLLKFMVDIALGMEYLSNRNFLHRDLAARNCMLRDDMTVC
VADFGLSKKIYSGDYYRQGRIAKMPVKWIAIESLADRVYTSKSDVWAFGV
TMWEIATRGMTPYPGVQNHEMYDYLLHGHRLKQPEDCLDELYEIMYSCWR
TDPLDRPTFSVLRLQLEKLLESLPDVRNQADVIYVNTQLLESSEGLAQGS
TLAPLDLNIDPDSIIASCTPRAAISVVTAEVHDSKPHEGRYILNGGSEEW
EDLTSAPSAAVTAEKNSVLPGERLVRNGVSWSHSSMLPLGSSLPDELLFA
DDSSEGSEVLM

[0142] (f) a naturally occurring N-terminal flanking region of ITSM only intracellular domains selected from;

YKMYGSEMLHKRDPLDEDEDTDISYKKLKEEEMAD
CSRAARGTIGARRTGQPLKEDPSAVPVFSVDYGELDFQWREKTPEPPVPC
VPEQ
RIRQKKAQGSTSSTRLHEPEKNAREITQDTNDITYADLNLPKGKKPAPQA
AEPNNH
KTHRRKAARTAVGRNDTHPTTGSASPKHQKKSKLHGPTETSSCSGAAPTV
EMDEELHYASLNFHGMNPSKDTS
KCYFLRKAKAKQMPVEMSRPAVPLLNSNNEKMSDPNMEANSHYGHNDDVR
NHAMKPINDNKEPLNSDVQYTEVQVSSAESHKDLGKKDTE
RRHQGKQNELSDTAGREINLVDAHLKSEQTEASTRQNSQVLLSETGIYDN
DPDLCFRMQEGSEVYSNPCLEENKPGIVYASLNHSVIGPNSRLARNVKEA
P
WRMMKYQQKAAGMSPEQVLQPLEGDLCYADLTLQLAGTSPQKATTKLSSA
QVDQVEVEYVTMASLPKEDISYASLTLGAEDQEPTYCNMGHLSSHLPGRG
PEEP
WRRKRKEKQSETSPKEFLTIYEDVKDLKTRRNHEQEQTFPGGGSTIYSMI
QSQSSAPTSQEPAYTLYSLIQPSRKSGSRKRNHSPSFNS
VRSCRKKSARPAAGVGDTGIEDANAVRGSASQGPLTEPWAEDSPPDQPPP
ASARSSVGEGELQYASLSFQMVKPWDSRGQEATD
NKCGRRNKFGINRPAVLAPEDGLAMSLHFMTLGGSSLSPTEGKGSGLQGH
IIENPQYFSDACVHHIKRRDIVLKWELGEGAFGKVFLAECHNLLPEQDKM
LVAVKALKEASESARQDFQREAELLTMLQHQHIVRFFGVCTEGRPLLMVF
EYMRHGDLNRFLRSHGPDAKLLAGGEDVAPGPLGLGQLLAVASQVAAGMV
YLAGLHFVHRDLATRNCLVGQGLVVKIGDFGMSRDIYS
KLARHSKFGMKGPASVISNDDDSASPLHHISNGSNTPSSSEGGPDAVIIG
MTKIPVIENPQYFGITNSQLKPDTFVQHIKRHNIVLKRELGEGAFGKVFL
AECYNLCPEQDKILVAVKTLKDASDNARKDFHREAELLTNLQHEHIVKFY
GVCVEGDPLIMVFEYMKHGDLNKFLRAHGPDAVLMAEGNPPTELTQSQML
HIAQQIAAGMVYLASQHFVHRDLATRNCLVGENLLVKIGDFGMSRDVYS
KRKGRCSVPAFCSSQAEAPADTPEPTAGHTLYSVLSQGYEKLDTPLRPAR
QQPTPTSDSSSDSNLTTEEDEDRPEVHKPISGRYEVFDQVTQEGAGHDPA
PEGQADYDPVTPYVTEVESVVGENTMYAQVFNLQGKTPVSQKEESSA
KRVQETKFGNAFTEEDSELVVNYIAKKSFCRRAIELTLHSLGVSEELQNK
LEDVVIDRNLLILGKILGEGEFGSVMEGNLKQEDGTSLKVAVKTMKLDNS
SQREIEEFLSEAACMKDFSHPNVIRLLGVCIEMSSQGIPKPMVILPFMKY
GDLHTYLLYSRLETGPKHIPLQTLLKFMVDIALGMEYLSNRNFLHRDLAA
RNCMLRDDMTVCVADFGLSKKIYSGDYYRQGRIAKMPVKWIAIESLADRV
YTSKSDVWAFGVTMWEIATRGM

[0143] (g) a naturally occurring intracellular domain between ITIM and ITSM from proteins that have ITIM.*ITSM motif selected from;

KEEEMAD
NFHGMNPSKDTS
QVSSAESHKDLGKKDTE
NLPKGKKPAPQAAEPNNH
NHSVIGPNSRLARNVKEAP
DFQWREKTPEPPVPCVPEQ
TLQLAGTSPQKATTKLSSAQVDQVEVEYVTMASLPKEDISYASLTLGAED
QEPTYCNMGHLSSHLPGRGPEEP
ETGPKHIPLQTLLKFMVDIALGMEYLSNRNFLHRDLAARNCMLRDDMTVC
VADFGLSKKIYSGDYYRQGRIAKMPVKWIAIESLADRVYTSKSDVWAFGV
TMWEIATRGM

[0144] (h) a naturally occurring intracellular domain from known inhibitory receptors selected from the sequences shown in table 2 wherein said intracellular domain is N-terminally flanking to a sequence in (f) or (g) above; and
[0145] (i) a non-naturally occurring sequence comprising between 1 and 500 amino acids.

[0146] In some embodiments, LA is absent or comprises one or more, preferably one, sequences selected from the group consisting of:
[0147] (j) a naturally occurring C-terminal flanking region of ITIM.*ITSM intracellular domains selected from:

SRP
RTQ
CVRS
KAENIIMMETAQTSL
RKAVPDAVESRYSRTEGSLDGT
VFPSGMGTSSPARRGSADGPRSAQPLRPEDGHCSWPL
QTSPQPASEDTLTYADLDMVHLNRTPKQPAPKPEPSFSEYASVQVPRK
QNHEMYDYLLHGHRLKQPEDCLDELYEIMYSCWRTDPLDRPTFSVLRLQL
EKLLESLPDVRNQADVIYVNTQLLESSEGLAQGSTLAPLDLNIDPDSIIA
SCTPRAAISVVTAEVHDSKPHEGRYILNGGSEEWEDLTSAPSAAVTAEKN
SVLPGERLVRNGVSWSHSSMLPLGSSLPDELLFADDSSEGSEVLM

[0148] (k) a naturally occurring C-terminal flanking region of ITSM only intracellular domain selected from

RTQ
SRP
KIHR
CVRS
KAENIIMMETAQTSL
RKAVPDAVESRYSRTEGSLDGT
RKPQVVPPPQQNDLEIPESPTYENFT
GKSQPKAQNPARLSRKELENFDVYS
VFPSGMGTSSPARRGSADGPRSAQPLRPEDGHCSWPL
QTSPQPASEDTLTYADLDMVHLNRTPKQPAPKPEPSFSEYASVQVPRK
FNLQGKTPVSQKEESSATIYCSIRKPQVVPPPQQNDLEIPESPTYENFT
GGRTMLPIRWMPPESILYRKFTTESDVWSFGVVLWEIFTYGKQPWYQLSN
TEAIDCITQGRELERPRACPPEVYAIMRGCWQREPQQRHSIKDVHARLQA
LAQAPPVYLDVLG
GGHTMLPIRWMPPESIMYRKFTTESDVWSLGVVLWEIFTYGKQPWYQLSN
NEVIECITQGRVLQRPRTCPQEVYELMLGCWQREPHMRKNIKGIHTLLQN
LAKASPVYLDILG
QNHEMYDYLLHGHRLKQPEDCLDELYEIMYSCWRTDPLDRPTFSVLRLQL
EKLLESLPDVRNQADVIYVNTQLLESSEGLAQGSTLAPLDLNIDPDSIIA
SCTPRAAISVVTAEVHDSKPHEGRYILNGGSEEWEDLTSAPSAAVTAEKN
SVLPGERLVRNGVSWSHSSMLPLGSSLPDELLFADDSSEGSEVLM
KDLKTRRNHEQEQTFPGGGSTIYSMIQSQSSAPTSQEPAYTLYSLIQPSR
KSGSRKRNHSPSFNSTIYEVIGKSQPKAQNPARLSRKELENFDVYS

[0149] (l) a naturally occurring intracellular domain from a known inhibitory receptor selected from the sequences shown in table 2 wherein said intracellular domain is C-terminally flanking to a sequence in (j) or (k) above; and
[0150] (m) a non-naturally occurring sequence comprising between 1 and 500 amino acids.

[0151] In some embodiments the intracellular domain comprises the sequence (L3-ITSM-L4)™ (i.e, n is 0 and p is 1).

[0152] In some embodiments, the intracellular domain comprises the sequence L3-ITSM-L4 (i.e, n is 0, m is 1 and p is 1).

[0153] In some embodiments, the intracellular domain comprises the sequence L3-ITSM-L4-L3-ITSM-L4 (i.e, n is 0, m is 2 and p is 1).

[0154] In some embodiments, the intracellular domain comprises the following sequence: ((L1-ITIM-L2)ⁿ-(L3-ITSM-L4) m) P, wherein
[0155] n is 0;
[0156] m is 1;
[0157] p is 1;
[0158] L3 comprises one sequence selected from
   [0159] (f) a naturally occurring N-terminal flanking region of an ITSM only intracellular domain such as, for example, any of the sequences shown in Table 6 below or a fragment thereof; or,
   [0160] (i) a non-naturally occurring sequence comprising between 1 and 500 amino acids; and
[0161] LA comprises one or more, preferably one or two, sequences selected from the group consisting of:
   [0162] (k) a naturally occurring C-terminal flanking region of an ITSM only intracellular domain such as, for example, any of the sequences shown in Table 8 below or a fragment thereof;
   [0163] (l) a naturally occurring intracellular domain from a known inhibitory receptor such as any of the sequences shown in table 2 or a fragment thereof wherein said intracellular domain is C-terminally flanking to a sequence in (k) above; and
   [0164] (m) a non-naturally occurring sequence comprising between 1 and 500 amino acids, and, wherein,
[0165] the ITSM is the sequence TX₁YX₂X₃X₄, wherein
[0166] X₁ is an amino acid,
[0167] X₂ is an amino acid,
[0168] X₃ is an amino acid, and,
[0169] X₄ is V or I,
[0170] or a variant thereof.

[0171] In some embodiments, the intracellular domain comprises the following sequence: ((L1-ITIM-L2)ⁿ-(L3-ITSM-L4)^{m})^{p}, wherein
[0172] n is 0;
[0173] m is 1;
[0174] p is 1;
[0175] L3 is selected from

YKMYGSEMLHKRDPLDEDEDTDISYKKLKEEEMAD
CSRAARGTIGARRTGQPLKEDPSAVPVFSVDYGELDFQWREKTPEPPVPC
VPEQ
RIRQKKAQGSTSSTRLHEPEKNAREITQDTNDITYADLNLPKGKKPAPQA
AEPNNH
KTHRRKAARTAVGRNDTHPTTGSASPKHQKKSKLHGPTETSSCSGAAPTV
EMDEELHYASLNFHGMNPSKDTS
KCYFLRKAKAKQMPVEMSRPAVPLLNSNNEKMSDPNMEANSHYGHNDDVR
NHAMKPINDNKEPLNSDVQYTEVQVSSAESHKDLGKKDTE
RRHQGKQNELSDTAGREINLVDAHLKSEQTEASTRQNSQVLLSETGIYDN
DPDLCFRMQEGSEVYSNPCLEENKPGIVYASLNHSVIGPNSRLARNVKEA
P
WRMMKYQQKAAGMSPEQVLQPLEGDLCYADLTLQLAGTSPQKATTKLSSA
QVDQVEVEYVTMASLPKEDISYASLTLGAEDQEPTYCNMGHLSSHLPGRG
PEEP
WRRKRKEKQSETSPKEFLTIYEDVKDLKTRRNHEQEQTFPGGGSTIYSMI
SQSSAPTSQEPAYTLYSLIQPSRKSGSRKRNHSPSFNS
VRSCRKKSARPAAGVGDTGIEDANAVRGSASQGPLTEPWAEDSPPDQPPP
ASARSSVGEGELQYASLSFQMVKPWDSRGQEATD
NKCGRRNKFGINRPAVLAPEDGLAMSLHFMTLGGSSLSPTEGKGSGLQGH
IIENPQYFSDACVHHIKRRDIVLKWELGEGAFGKVFLAECHNLLPEQDKM
LVAVKALKEASESARQDFQREAELLTMLQHQHIVRFFGVCTEGRPLLMVF
EYMRHGDLNRFLRSHGPDAKLLAGGEDVAPGPLGLGQLLAVASQVAAGMV
YLAGLHFVHRDLATRNCLVGQGLVVKIGDFGMSRDIYS
KLARHSKFGMKGPASVISNDDDSASPLHHISNGSNTPSSSEGGPDAVIIG
MTKIPVIENPQYFGITNSQLKPDTFVQHIKRHNIVLKRELGEGAFGKVFL
AECYNLCPEQDKILVAVKTLKDASDNARKDFHREAELLTNLQHEHIVKFY
GVCVEGDPLIMVFEYMKHGDLNKFLRAHGPDAVLMAEGNPPTELTQSQML
HIAQQIAAGMVYLASQHFVHRDLATRNCLVGENLLVKIGDFGMSRDVYS
KRKGRCSVPAFCSSQAEAPADTPEPTAGHTLYSVLSQGYEKLDTPLRPAR
QQPTPTSDSSSDSNLTTEEDEDRPEVHKPISGRYEVFDQVTQEGAGHDPA
PEGQADYDPVTPYVTEVESVVGENTMYAQVFNLQGKTPVSQKEESSA
KRVQETKFGNAFTEEDSELVVNYIAKKSFCRRAIELTLHSLGVSEELQNK
LEDVVIDRNLLILGKILGEGEFGSVMEGNLKQEDGTSLKVAVKTMKLDNS
SQREIEEFLSEAACMKDFSHPNVIRLLGVCIEMSSQGIPKPMVILPFMKY
GDLHTYLLYSRLETGPKHIPLQTLLKFMVDIALGMEYLSNRNFLHRDLAA
RNCMLRDDMTVCVADFGLSKKIYSGDYYRQGRIAKMPVKWIAIESLADRV
YTSKSDVWAFGVTMWEIATRGM

[0176] and L4 comprises one sequence selected from the group consisting of (k)

RTQ
SRP
KIHR
CVRS
KAENIIMMETAQTSL
RKAVPDAVESRYSRTEGSLDGT
RKPQVVPPPQQNDLEIPESPTYENFT
GKSQPKAQNPARLSRKELENFDVYS
VFPSGMGTSSPARRGSADGPRSAQPLRPEDGHCSWPL
QTSPQPASEDTLTYADLDMVHLNRTPKQPAPKPEPSFSEYASVQVPRK
FNLQGKTPVSQKEESSATIYCSIRKPQVVPPPQQNDLEIPESPTYENFT
GGRTMLPIRWMPPESILYRKFTTESDVWSFGVVLWEIFTYGKQPWYQLSN
EAIDCITQGRELERPRACPPEVYAIMRGCWQREPQQRHSIKDVHARLQAL
AQAPPVYLDVLG
GGHTMLPIRWMPPESIMYRKFTTESDVWSLGVVLWEIFTYGKQPWYQLSN
NEVIECITQGRVLQRPRTCPQEVYELMLGCWQREPHMRKNIKGIHTLLQN
LAKASPVYLDILG
QNHEMYDYLLHGHRLKQPEDCLDELYEIMYSCWRTDPLDRPTFSVLRLQL
EKLLESLPDVRNQADVIYVNTQLLESSEGLAQGSTLAPLDLNIDPDSIIA
SCTPRAAISVVTAEVHDSKPHEGRYILNGGSEEWEDLTSAPSAAVTAEKN
SVLPGERLVRNGVSWSHSSMLPLGSSLPDELLFADDSSEGSEVLM
KDLKTRRNHEQEQTFPGGGSTIYSMIQSQSSAPTSQEPAYTLYSLIQPSR
KSGSRKRNHSPSFNSTIYEVIGKSQPKAQNPARLSRKELENFDVYS

[0177] and optionally
[0178] (l) a naturally occurring intracellular domain from a known inhibitory receptor such as any of the sequences shown in table 2 or a fragment thereof wherein said intracellular domain is C-terminally flanking to a sequence in (k) above;
[0179] and the ITSM is the sequence TX₁YX₂X₃X₄, wherein
[0180] X₁ is an amino acid,
[0181] X₂ is an amino acid,
[0182] X₃ is an amino acid, and,
[0183] X₄ is V or I,
[0184] or a variant thereof.

[0185] In some embodiments, the intracellular domain comprises the following sequence: ((L1-ITIM-L2)ⁿ-(L3-ITSM-L4) m)^{p}, wherein
[0186] n is 0;
[0187] m is 1;
[0188] p is 1;
[0189] L3 is selected from

CSRAARGTIGARRTGQPLKEDPSAVPVFSVDYGELDFQWREKTPEPPVPC
VPEQ
RIRQKKAQGSTSSTRLHEPEKNAREITQDTNDITYADLNLPKGKKPAPQA
AEPNNH
KCYFLRKAKAKQMPVEMSRPAVPLLNSNNEKMSDPNMEANSHYGHNDDVR
NHAMKPINDNKEPLNSDVQYTEVQVSSAESHKDLGKKDTE
RRHQGKQNELSDTAGREINLVDAHLKSEQTEASTRQNSQVLLSETGIYDN
DPDLCFRMQEGSEVYSNPCLEENKPGIVYASLNHSVIGPNSRLARNVKEA
P
WRMMKYQQKAAGMSPEQVLQPLEGDLCYADLTLQLAGTSPQKATTKLSSA
QVDQVEVEYVTMASLPKEDISYASLTLGAEDQEPTYCNMGHLSSHLPGRG
PEEP
WRRKRKEKQSETSPKEFLTIYEDVKDLKTRRNHEQEQTFPGGGSTIYSMI
QSQSSAPTSQEPAYTLYSLIQPSRKSGSRKRNHSPSFNS
VRSCRKKSARPAAGVGDTGIEDANAVRGSASQGPLTEPWAEDSPPDQPPP
SARSSVGEGELQYASLSFQMVKPWDSRGQEATD
KRKGRCSVPAFCSSQAEAPADTPEPTAGHTLYSVLSQGYEKLDTPLRPAR
QQPTPTSDSSSDSNLTTEEDEDRPEVHKPISGRYEVFDQVTQEGAGHDPA
PEGQADYDPVTPYVTEVESVVGENTMYAQVFNLQGKTPVSQKEESSA

L4 comprises one sequence selected from the group consisting of (k)

SRP
KIHR
CVRS
RKAVPDAVESRYSRTEGSLDGT
RKPQVVPPPQQNDLEIPESPTYENFT
GKSQPKAQNPARLSRKELENFDVYS
VFPSGMGTSSPARRGSADGPRSAQPLRPEDGHCSWPL
QTSPQPASEDTLTYADLDMVHLNRTPKQPAPKPEPSFSEYASVQVPRK

[0190] and optionally
[0191] (l) a naturally occurring intracellular domain from a known inhibitory receptor selected from the sequences shown in table 2 or a fragment thereof wherein said intracellular domain is C-terminally flanking to a sequence in (k) above;
[0192] and the ITSM is the sequence TX₁YX₂X₃X₄, wherein
[0193] X₁ is an amino acid,
[0194] X₂ is an amino acid,
[0195] X₃ is an amino acid, and,
[0196] X₄ is V or I,
[0197] or a variant thereof.

[0198] In some embodiments, the intracellular domain comprises the following sequence: ((L1-ITIM-L2)ⁿ-(L3-ITSM-L4)^{m})^{p}, wherein
[0199] n is 0;
[0200] m is 1;
[0201] p is 1;
[0202] L3 is selected from

CSRAARGTIGARRTGQPLKEDPSAVPVFSVDYGELDFQWREKTPEPPVPC
VPEQ

[0203] and L4 comprises
[0204] (k)

VFPSGMGTSSPARRGSADGPRSAQPLRPEDGHCSWPL

[0205] and
[0206] (l) a naturally occurring intracellular domain from a known inhibitory receptor selected from the sequences shown in table 2 or a fragment thereof wherein said intracellular domain is C-terminally flanking to a sequence in (k) above;
[0207] and the ITSM is the sequence TX₁YX₂X₃X₄, wherein
[0208] X₁ is an amino acid,
[0209] X₂ is an amino acid,
[0210] X₃ is an amino acid, and,
[0211] X₄ is V or I,
[0212] or a variant thereof.

[0213] In some embodiments, the intracellular domain comprises the following sequence: ((L1-ITIM-L2)ⁿ-(L3-ITSM-L4)^{m})^{p}, wherein
[0214] n is 0;
[0215] m is 1;
[0216] p is 1;
[0217] L3 is selected from

WRMMKYQQKAAGMSPEQVLQPLEGDLCYADLTLQLAGTSPQKATTKLSSA
QVDQVEVEYVTMASLPKEDISYASLTLGAEDQEPTYCNMGHLSSHLPGRG
PEEP

[0218] LA comprises
[0219] (k)

SRP

[0220] and optionally
[0221] (l) a naturally occurring intracellular domain from a known inhibitory receptor selected from the sequences shown in table 2 or a fragment thereof wherein said intracellular domain is C-terminally flanking to a sequence in (k) above;
[0222] and the ITSM is the sequence TX₁YX₂X₃X₄, wherein
[0223] X₁ is an amino acid,
[0224] X₂ is an amino acid,
[0225] X₃ is an amino acid, and,
[0226] X₄ is V or I,
[0227] or a variant thereof.

[0228] In some embodiments, the intracellular domain comprises the following sequence: ((L1-ITIM-L2)ⁿ-(L3-ITSM-L4) m) P, wherein
[0229] n is 0;
[0230] m is 1;
[0231] p is 1 or 2;
[0232] L3 comprises one sequence selected from
   [0233] (i) a non-naturally occurring sequence comprising between 1 and 500 amino acids; and
[0234] L4 comprises one or more, preferably one or two, sequences selected from:
   [0235] (m) a non-naturally occurring sequence comprising between 1 and 500 amino acids, and, wherein,
[0236] the ITSM is the sequence TX₁YX₂X₃X₄, wherein
[0237] X₁ is an amino acid,
[0238] X₂ is an amino acid,
[0239] X₃ is an amino acid, and,
[0240] X₄ is V or I.

[0241] In some embodiments, the intracellular domain comprises the sequence (L1-ITIM-L2-L3-ITSM-L4)^{p} wherein p is 1, 2, 3, 4 or 5;
[0242] L1 is a naturally occurring N-terminal flanking region of an ITIM only intracellular domain or a fragment thereof such as, for example, any of the sequences shown in Table 3 below or a fragment thereof;
[0243] L2 is absent;
[0244] L3 is a naturally occurring intracellular domain between ITIM and ITSM from proteins that have ITIM.*ITSM motif or a fragment thereof such as, for example, any of the sequences shown in Table 5 below or a fragment thereof;
[0245] L4 is a naturally occurring C-terminal flanking region of an ITIM.*ITSM intracellular domain or a fragment thereof such as, for example, any of the sequences shown in Table 7 below or a fragment thereof; or a naturally occurring C-terminal flanking region of ITSM only intracellular domain or a fragment thereof such as, for example, any of the sequences shown in Table 8 below or a fragment thereof.

[0246] In some embodiments, the intracellular domain comprises the sequence (L1-ITIM-L2-L3-ITSM-L4) P wherein
[0247] p is 1, 2, 3, 4 or 5;
[0248] L1 is a naturally occurring N-terminal flanking region of ITIM only intracellular domains selected from the following sequences;

YKMYGSEMLHKRDPLDEDEDTD
DHWALTQRTARAVSPQSTKPMAES
CSRAARGTIGARRTGQPLKEDPSAVPVFS
HRQNQIKQGPPRSKDEEQKPQQRPDLAVDVLERTADKATVNGLPEKDRET
DTSALAAGSSQE
KTHRRKAARTAVGRNDTHPTTGSASPKHQKKSKLHGPTETSSCSGAAPTV
EMDEE
LTRKKKALRIHSVEGDLRRKSAGQEEWSPSAPSPPGSCVQAEAAPAGLCG
EQRGEDCAELHDYFNV
KCYFLRKAKAKQMPVEMSRPAVPLLNSNNEKMSDPNMEANSHYGHNDDVR
NHAMKPINDNKEPLNSD
RRHQGKQNELSDTAGREINLVDAHLKSEQTEASTRQNSQVLLSETGIYDN
DPDLCFRMQEGSEVYSNPCLEENKPG
WRMMKYQQKAAGMSPEQVLQPLEGDLCYADLTLQLAGTSPQKATTKLSSA
QVDQVEVEYVTMASLPKED
KRVQETKFGNAFTEEDSELVVNYIAKKSFCRRAIELTLHSLGVSEELQNK
LEDVVIDRNLLILGKILGEGEFGSVMEGNLKQEDGTSLKVAVKTMKLDNS
SQREIEEFLSEAACMKDFSHPNVIRLLGVCIEMSSQGIPKPMVILPFMKY
GDLHTY

[0249] L2 is absent;
[0250] L3 is a naturally occurring intracellular domain between ITIM and ITSM from proteins that have ITIM.*ITSM motif selected from the following sequences:

KEEEMAD
NFHGMNPSKDTS
QVSSAESHKDLGKKDTE
NLPKGKKPAPQAAEPNNH
NHSVIGPNSRLARNVKEAP
DFQWREKTPEPPVPCVPEQ
TLQLAGTSPQKATTKLSSAQVDQVEVEYVTMASLPKEDISYASLTLGAED
QEPTYCNMGHLSSHLPGRGPEEP
ETGPKHIPLQTLLKFMVDIALGMEYLSNRNFLHRDLAARNCMLRDDMTVC
VADFGLSKKIYSGDYYRQGRIAKMPVKWIAIESLADRVYTSKSDVWAFGV
TMWEIATRGM

[0251] L4 is a naturally occurring C-terminal flanking region of ITIM.*ITSM intracellular domains selected from the following sequences:

SRP
RTQ
CVRS
KAENIIMMETAQTSL
RKAVPDAVESRYSRTEGSLDGT
VFPSGMGTSSPARRGSADGPRSAQPLRPEDGHCSWPL
QTSPQPASEDTLTYADLDMVHLNRTPKQPAPKPEPSFSEYASVQVPRK
QNHEMYDYLLHGHRLKQPEDCLDELYEIMYSCWRTDPLDRPTFSVLRLQL
EKLLESLPDVRNQADVIYVNTQLLESSEGLAQGSTLAPLDLNIDPDSIIA
SCTPRAAISVVTAEVHDSKPHEGRYILNGGSEEWEDLTSAPSAAVTAEKN
SVLPGERLVRNGVSWSHSSMLPLGSSLPDELLFADDSSEGSEVLM

[0252] or a naturally occurring C-terminal flanking region of ITSM only intracellular domains selected from the following sequences:

RTQ
SRP
CVRS
KAENIIMMETAQTSL
RKAVPDAVESRYSRTEGSLDGT
VFPSGMGTSSPARRGSADGPRSAQPLRPEDGHCSWPL
QTSPQPASEDTLTYADLDMVHLNRTPKQPAPKPEPSFSEYASVQVPRK
FNLQGKTPVSQKEESSATIYCSIRKPQVVPPPQQNDLEIPESPTYENFT
GGRTMLPIRWMPPESILYRKFTTESDVWSFGVVLWEIFTYGKQPWYQLSN
TEAIDCITQGRELERPRACPPEVYAIMRGCWQREPQQRHSIKDVHARLQA
LAQAPPVYLDVLG
GGHTMLPIRWMPPESIMYRKFTTESDVWSLGVVLWEIFTYGKQPWYQLSN
NEVIECITQGRVLQRPRTCPQEVYELMLGCWQREPHMRKNIKGIHTLLQN
LAKASPVYLDILG
QNHEMYDYLLHGHRLKQPEDCLDELYEIMYSCWRTDPLDRPTFSVLRLQL
EKLLESLPDVRNQADVIYVNTQLLESSEGLAQGSTLAPLDLNIDPDSIIA
SCTPRAAISVVTAEVHDSKPHEGRYILNGGSEEWEDLTSAPSAAVTAEKN
SVLPGERLVRNGVSWSHSSMLPLGSSLPDELLFADDSSEGSEVLM
KDLKTRRNHEQEQTFPGGGSTIYSMIQSQSSAPTSQEPAYTLYSLIQPSR
KSGSRKRNHSPSFNSTIYEVIGKSQPKAQNPARLSRKELENFDVYS.

or a variant thereof.

[0253] In some embodiments, the non-naturally occurring sequence of (d), (i) and (m) comprises between 1 and 500 amino acids, preferably 1 to 400, 1 to 300, 1 to 200, 1 to 100, 10 to 100, 10 to 80, 10 to 60, 10 to 40, 100 to 200, 100 to 300 or 100 to 400.

[0254] In some embodiments, the non-naturally occurring sequence of (d) or (i) is a Glycine/Serine linker (GlyₓSer)ₙ where x=1, 2, 3, 4 or 5 and n is 1 to 100. Preferably the Glycine/Serine linker comprises the amino acid sequence (Gly-Gly-Gly-Ser)ₙ or (Gly-Gly-Gly-Gly-Ser)ₙ, where n is a positive integer equal to or greater than 1, preferably between 1 to 100, 1 to 80, 1 to 50, 1 to 20 or 1 to 10. For example, n=1, n=2, n=3, n=4, n=5, n=6, n=7, n=8, n=9 and n=10. In one embodiment, the glycine/serine linkers include, but are not limited to, (Gly₄Ser)₄ or (Gly₄Ser)₃.

[0255] In some embodiments, X₁ is E, V or I.

[0256] In some embodiments, X₁ is E.

[0257] In some embodiments, X₂ is S or A.

[0258] In some embodiments, X₂ is A.

[0259] In some embodiments, X₃ is E, S, T, Q or V.

[0260] In some embodiments, X₃ is E.

[0261] In some embodiments, X₃ is T.

[0262] In some embodiments, X₂ is I.

[0263] In some embodiments, X₅ is L, V or I.

[0264] In some embodiments, X₅ is L.

[0265] In some embodiments, X₅ is V.

[0266] In some embodiments, X₅ is I.

[0267] In some embodiments, X₆ is A, H, Q, T, D, V, L or E.

[0268] In some embodiments, X₆ is H.

[0269] In some embodiments, X₆ is D.

[0270] In some embodiments, X₇ is A, G, T, V or E.

[0271] In some embodiments, X₇ is A.

[0272] In some embodiments, X₇ is G.

[0273] In some embodiments, X₈ is V, S, D or E.

[0274] In some embodiments, X₈ is S or E.

[0275] In some embodiments, X₈ is E.

[0276] In some embodiments, X₉ is L or V.

[0277] In some embodiments, X₉ is L.

[0278] In some embodiments, X₅ is L or V, X₈ is E and X₉ is L.

[0279] In some embodiments, the ITSM, or at least one of the ITSMs when several ITSMs are present in the intracellular domain, is selected from SEQ ID No 926 to SEQ ID No 1015 (see below table).

| | |
|---|---|
| TAYELV | SEQ ID No 926 |
| TAYGLI | SEQ ID No 927 |
| TAYNAV | SEQ ID No 928 |
| TCYGLV | SEQ ID No 929 |
| TCYPDI | SEQ ID No 930 |
| TDYASI | SEQ ID No 931 |
| TDYDLV | SEQ ID No 932 |
| TDYLSI | SEQ ID No 933 |
| TDYQQV | SEQ ID No 934 |
| TDYYRV | SEQ ID No 935 |
| TEYASI | SEQ ID No 936 |
| TEYATI | SEQ ID No 937 |
| TEYDTI | SEQ ID No 938 |
| TEYPLV | SEQ ID No 939 |
| TEYSEI | SEQ ID No 940 |
| TEYSEV | SEQ ID No 941 |
| TEYSTI | SEQ ID No 942 |
| TEYTKV | SEQ ID No 943 |
| TFYHVV | SEQ ID No 944 |
| TFYLLI | SEQ ID No 945 |
| TFYNKI | SEQ ID No 946 |
| TFYPDI | SEQ ID No 947 |
| TGYEDV | SEQ ID No 948 |
| TGYLSI | SEQ ID No 949 |
| THYKEI | SEQ ID No 950 |
| TIYAQV | SEQ ID No 951 |
| TIYAVV | SEQ ID No 952 |
| TIYCSI | SEQ ID No 953 |
| TIYEDV | SEQ ID No 954 |
| TIYERI | SEQ ID No 955 |
| TAYELV | SEQ ID No 86 |
| TIYEVI | SEQ ID No 956 |
| TIYHVI | SEQ ID No 957 |
| TIYIGV | SEQ ID No 958 |
| TIYLKV | SEQ ID No 959 |
| TIYSMI | SEQ ID No 960 |
| TIYSTI | SEQ ID No 961 |
| TIYTYI | SEQ ID No 962 |
| TKYFHI | SEQ ID No 963 |
| TKYMEI | SEQ ID No 964 |
| TKYQSV | SEQ ID No 965 |
| TKYSNI | SEQ ID No 966 |
| TKYSTV | SEQ ID No 967 |
| TLYASV | SEQ ID No 968 |
| TLYAVV | SEQ ID No 969 |
| TLYFWV | SEQ ID No 970 |
| TLYHLV | SEQ ID No 971 |
| TLYPMV | SEQ ID No 972 |
| TLYPPI | SEQ ID No 973 |
| TLYRDI | SEQ ID No 974 |
| TLYRDV | SEQ ID No 975 |
| TLYSKI | SEQ ID No 976 |
| TLYSLI | SEQ ID No 977 |
| TLYSPV | SEQ ID No 978 |
| TMYAQV | SEQ ID No 979 |
| TMYCQV | SEQ ID No 980 |
| TNYKAV | SEQ ID No 981 |
| TNYNLV | SEQ ID No 982 |
| TPYAGI | SEQ ID No 983 |
| TPYPGV | SEQ ID No 984 |
| TPYVDI | SEQ ID No 985 |
| TAYELV | SEQ ID No 86 |
| TQYGRV | SEQ ID No 986 |
| TQYNQV | SEQ ID No 987 |
| TRYAYV | SEQ ID No 988 |
| TRYGEV | SEQ ID No 989 |
| TRYHSV | SEQ ID No 990 |
| TRYKTI | SEQ ID No 991 |
| TRYLAI | SEQ ID No 992 |
| TRYMAI | SEQ ID No 993 |
| TRYQKI | SEQ ID No 994 |
| TRYQQI | SEQ ID No 995 |
| TRYSNI | SEQ ID No 996 |
| TRYSPI | SEQ ID No 997 |
| TSYGTV | SEQ ID No 998 |
| TSYMEV | SEQ ID No 999 |
| TSYQGV | SEQ ID No 1000 |
| TSYTTI | SEQ ID No 1001 |
| TTYRSI | SEQ ID No 1002 |
| TTYSDV | SEQ ID No 1003 |
| TTYVTI | SEQ ID No 1004 |
| TVYAQI | SEQ ID No 1005 |
| TVYASV | SEQ ID No 1006 |
| TVYEVI | SEQ ID No 1007 |
| TVYGDV | SEQ ID No 1008 |
| TVYKGI | SEQ ID No 1009 |
| TVYQRV | SEQ ID No 1010 |
| TVYSEV | SEQ ID No 1011 |
| TVYSTV | SEQ ID No 1012 |
| TYYHSI | SEQ ID No 1013 |
| TYYLQI | SEQ ID No 1014 |
| TYYYSV | SEQ ID No 1015 |
| TAYELV | SEQ ID No 86 |

[0280] In some embodiments, the ITSM, or at least one of the ITSMs when several ITSMs are present in the intracellular domain is TEYASI.

[0281] In some embodiments, the ITSM, or at least one of the ITSMs when several ITSMs are present in the intracellular domain is TEYSEI.

[0282] In some embodiments, the ITSM, or at least one of the ITSMs when several ITSMs are present in the intracellular domain is TVYSEV.

[0283] In some embodiments, the ITSM, or at least one of the ITSMs when several ITSMs are present in the intracellular domain is TEYSTI.

[0284] In some embodiments, the ITIM, or at least one of the ITIMs when several ITIMs are present in the intracellular domain is selected from SEQ ID No 1016 to SEQ ID 1998 (see below table).

| | |
|---|---|
| LLYEMV | SEQ ID No 1016 |
| ITYFAL | SEQ ID No 1017 |
| ISYKGL | SEQ ID No 1018 |
| LAYHTV | SEQ ID No 1019 |
| VQYLRL | SEQ ID No 1020 |
| LTYVLL | SEQ ID No 1021 |
| VRYSIV | SEQ ID No 1022 |
| LLYLLL | SEQ ID No 1023 |
| IAYGDI | SEQ ID No 1024 |
| IAYRDL | SEQ ID No 1025 |
| IAYSLL | SEQ ID No 1026 |
| IAYSRL | SEQ ID No 1027 |
| ICYALL | SEQ ID No 1028 |
| ICYDAL | SEQ ID No 1029 |
| ICYPLL | SEQ ID No 1030 |
| ICYQLI | SEQ ID No 1031 |
| IDYILV | SEQ ID No 1032 |
| IDYKTL | SEQ ID No 1033 |
| IDYTQL | SEQ ID No 1034 |
| IDYYNL | SEQ ID No 1035 |
| IEYCKL | SEQ ID No 1036 |
| IEYDQI | SEQ ID No 1037 |
| IEYGPL | SEQ ID No 1038 |
| IEYIRV | SEQ ID No 1039 |
| IEYKSL | SEQ ID No 1040 |
| IEYKTL | SEQ ID No 1041 |
| IEYSVL | SEQ ID No 1042 |
| IEYWGI | SEQ ID No 1043 |
| IFYGNV | SEQ ID No 1044 |
| IFYHNL | SEQ ID No 1045 |
| IFYKDI | SEQ ID No 1046 |
| IFYQNV | SEQ ID No 1047 |
| IFYRLI | SEQ ID No 1048 |
| IGYDIL | SEQ ID No 1049 |
| IGYDVL | SEQ ID No 1050 |
| IGYICL | SEQ ID No 1051 |
| IGYKAI | SEQ ID No 1052 |
| IGYLEL | SEQ ID No 1053 |
| IGYLPL | SEQ ID No 1054 |
| IGYLRL | SEQ ID No 1055 |
| IGYPFL | SEQ ID No 1056 |
| IGYSDL | SEQ ID No 1057 |
| IHYRQI | SEQ ID No 1058 |
| IHYSEL | SEQ ID No 1059 |
| IIYAFL | SEQ ID No 1060 |
| IIYHVI | SEQ ID No 1061 |
| IIYMFL | SEQ ID No 1062 |
| IIYNLL | SEQ ID No 1063 |
| IIYNNL | SEQ ID No 1064 |
| IIYSEV | SEQ ID No 1065 |
| IKYCLV | SEQ ID No 1066 |
| IKYKEL | SEQ ID No 1067 |
| IKYLAL | SEQ ID No 1068 |
| IKYTCI | SEQ ID No 1069 |
| ILYADI | SEQ ID No 1070 |
| ILYAFL | SEQ ID No 1071 |
| ILYCSV | SEQ ID No 1072 |
| ILYEGL | SEQ ID No 1073 |
| ILYELL | SEQ ID No 1074 |
| ILYFQI | SEQ ID No 1075 |
| ILYHTV | SEQ ID No 1076 |
| ILYLQV | SEQ ID No 1077 |
| ILYSIL | SEQ ID No 1078 |
| ILYSVL | SEQ ID No 1079 |
| ILYTEL | SEQ ID No 1080 |
| ILYTIL | SEQ ID No 1081 |
| IMYTLV | SEQ ID No 1082 |
| INYCSV | SEQ ID No 1083 |
| INYKDI | SEQ ID No 1084 |
| INYTTV | SEQ ID No 1085 |
| INYVLL | SEQ ID No 1086 |
| IPYDVL | SEQ ID No 1087 |
| IPYLLV | SEQ ID No 1088 |
| IPYRTV | SEQ ID No 1089 |
| IPYSQL | SEQ ID No 1090 |
| IPYSRI | SEQ ID No 1091 |
| IPYTQI | SEQ ID No 1092 |
| IQYAPL | SEQ ID No 1093 |
| IQYASL | SEQ ID No 1094 |
| IQYERL | SEQ ID No 1095 |
| IQYGII | SEQ ID No 1096 |
| IQYGNV | SEQ ID No 1097 |
| IQYGRV | SEQ ID No 1098 |
| IQYNVV | SEQ ID No 1099 |
| IQYRSI | SEQ ID No 1100 |
| IQYTEL | SEQ ID No 1101 |
| IQYWGI | SEQ ID No 1102 |
| IRYANL | SEQ ID No 1103 |
| IRYLDL | SEQ ID No 1104 |
| IRYPLL | SEQ ID No 1105 |
| IRYRLL | SEQ ID No 1106 |
| IRYRTI | SEQ ID No 1107 |
| ISYASL | SEQ ID No 1108 |
| ISYCGV | SEQ ID No 1109 |
| ISYEPI | SEQ ID No 1110 |
| ISYFQI | SEQ ID No 1111 |
| ISYGLI | SEQ ID No 1112 |
| ISYKKL | SEQ ID No 1113 |
| ISYLPL | SEQ ID No 1114 |
| ISYPML | SEQ ID No 1115 |
| ISYTTL | SEQ ID No 1116 |
| ITYAAV | SEQ ID No 1117 |
| ITYADL | SEQ ID No 1118 |
| ITYAEL | SEQ ID No 1119 |
| ITYAEV | SEQ ID No 1120 |
| ITYASV | SEQ ID No 1121 |
| ITYDLI | SEQ ID No 1122 |
| ITYENV | SEQ ID No 1123 |
| ITYQLL | SEQ ID No 1124 |
| ITYSLL | SEQ ID No 1125 |
| IVYAEL | SEQ ID No 1126 |
| IVYALV | SEQ ID No 1127 |
| IVYASL | SEQ ID No 1128 |
| IVYEIL | SEQ ID No 1129 |
| IVYFIL | SEQ ID No 1130 |
| IVYHML | SEQ ID No 1131 |
| IVYLCI | SEQ ID No 1132 |
| IVYRLL | SEQ ID No 1133 |
| IVYSAL | SEQ ID No 1134 |
| IVYSWV | SEQ ID No 1135 |
| IVYTEL | SEQ ID No 1136 |
| IVYYIL | SEQ ID No 1137 |
| IWYENL | SEQ ID No 1138 |
| IWYFVV | SEQ ID No 1139 |
| IWYNIL | SEQ ID No 1140 |
| IYYLGV | SEQ ID No 1141 |
| LAYALL | SEQ ID No 1142 |
| LAYARI | SEQ ID No 1143 |
| LAYDSV | SEQ ID No 1144 |
| LAYFGV | SEQ ID No 1145 |
| LAYHRL | SEQ ID No 1146 |
| LAYKDL | SEQ ID No 1147 |
| LAYKRI | SEQ ID No 1148 |
| LAYPPL | SEQ ID No 1149 |
| LAYQTL | SEQ ID No 1150 |
| LAYREV | SEQ ID No 1151 |
| LAYRII | SEQ ID No 1152 |
| LAYRLL | SEQ ID No 1153 |
| LAYSQL | SEQ ID No 1154 |
| LAYSSV | SEQ ID No 1155 |
| LAYTLL | SEQ ID No 1156 |
| LAYWGI | SEQ ID No 1157 |
| LAYYTV | SEQ ID No 1158 |
| LCYADL | SEQ ID No 1159 |
| LCYAIL | SEQ ID No 1160 |
| LCYFHL | SEQ ID No 1161 |
| LCYHPI | SEQ ID No 1162 |
| LCYKEI | SEQ ID No 1163 |
| LCYKFL | SEQ ID No 1164 |
| LCYMII | SEQ ID No 1165 |
| LCYRKI | SEQ ID No 1166 |
| LCYRVL | SEQ ID No 1167 |
| LCYSTV | SEQ ID No 1168 |
| LCYTLV | SEQ ID No 1169 |
| LDYASI | SEQ ID No 1170 |
| LDYCEL | SEQ ID No 1171 |
| LDYDKI | SEQ ID No 1172 |
| LDYDKL | SEQ ID No 1173 |
| LDYDYL | SEQ ID No 1174 |
| LDYDYV | SEQ ID No 1175 |
| LDYEFL | SEQ ID No 1176 |
| LDYINV | SEQ ID No 1177 |
| LDYNNL | SEQ ID No 1178 |
| LDYPHV | SEQ ID No 1179 |
| LDYSPV | SEQ ID No 1180 |
| LDYVEI | SEQ ID No 1181 |
| LDYWGI | SEQ ID No 1182 |
| LEYAPV | SEQ ID No 1183 |
| LEYIPL | SEQ ID No 1184 |
| LEYKTI | SEQ ID No 1185 |
| LEYLCL | SEQ ID No 1186 |
| LEYLKL | SEQ ID No 1187 |
| LEYLQI | SEQ ID No 1188 |
| LEYLQL | SEQ ID No 1189 |
| LEYQRL | SEQ ID No 1190 |
| LEYVDL | SEQ ID No 1191 |
| LEYVSV | SEQ ID No 1192 |
| LEYYQI | SEQ ID No 1193 |
| LFYAQL | SEQ ID No 1194 |
| LFYCSV | SEQ ID No 1195 |
| LFYERV | SEQ ID No 1196 |
| LFYGFL | SEQ ID No 1197 |
| LFYKYV | SEQ ID No 1198 |
| LFYLLL | SEQ ID No 1199 |
| LFYNKV | SEQ ID No 1200 |
| LFYRHL | SEQ ID No 1201 |
| LFYTLL | SEQ ID No 1202 |
| LFYWDV | SEQ ID No 1203 |
| LFYWKL | SEQ ID No 1204 |
| LGYGNV | SEQ ID No 1205 |
| LGYKEL | SEQ ID No 1206 |
| LGYLQL | SEQ ID No 1207 |
| LGYPLI | SEQ ID No 1208 |
| LGYPWV | SEQ ID No 1209 |
| LGYSAL | SEQ ID No 1210 |
| LGYSDL | SEQ ID No 1211 |
| LGYVTL | SEQ ID No 1212 |
| LHYAKI | SEQ ID No 1213 |
| LHYALV | SEQ ID No 1214 |
| LHYANL | SEQ ID No 1215 |
| LHYARL | SEQ ID No 1216 |
| LHYASI | SEQ ID No 1217 |
| LHYASL | SEQ ID No 1218 |
| LHYASV | SEQ ID No 1219 |
| LHYATI | SEQ ID No 1220 |
| LHYATL | SEQ ID No 1221 |
| LHYAVL | SEQ ID No 1222 |
| LHYDVV | SEQ ID No 1223 |
| LHYEGL | SEQ ID No 1224 |
| LHYETI | SEQ ID No 1225 |
| LHYFEI | SEQ ID No 1226 |
| LHYFVV | SEQ ID No 1227 |
| LHYGAI | SEQ ID No 1228 |
| LHYILI | SEQ ID No 1229 |
| LHYINL | SEQ ID No 1230 |
| LHYKRI | SEQ ID No 1231 |
| LHYLDL | SEQ ID No 1232 |
| LHYLNI | SEQ ID No 1233 |
| LHYLTI | SEQ ID No 1234 |
| LHYLVI | SEQ ID No 1235 |
| LHYMAI | SEQ ID No 1236 |
| LHYMII | SEQ ID No 1237 |
| LHYMNI | SEQ ID No 1238 |
| LHYMTI | SEQ ID No 1239 |
| LHYMTL | SEQ ID No 1240 |
| LHYMTV | SEQ ID No 1241 |
| LHYMVI | SEQ ID No 1242 |
| LHYNML | SEQ ID No 1243 |
| LHYPAL | SEQ ID No 1244 |
| LHYPDL | SEQ ID No 1245 |
| LHYPII | SEQ ID No 1246 |
| LHYPIL | SEQ ID No 1247 |
| LHYPLL | SEQ ID No 1248 |
| LHYPML | SEQ ID No 1249 |
| LHYPNV | SEQ ID No 1250 |
| LHYPSI | SEQ ID No 1251 |
| LHYPTI | SEQ ID No 1252 |
| LHYPTL | SEQ ID No 1253 |
| LHYPTV | SEQ ID No 1254 |
| LHYPVI | SEQ ID No 1255 |
| LHYPVL | SEQ ID No 1256 |
| LHYRII | SEQ ID No 1257 |
| LHYRTI | SEQ ID No 1258 |
| LHYSII | SEQ ID No 1259 |
| LHYSSI | SEQ ID No 1260 |
| LHYSTI | SEQ ID No 1261 |
| LHYSTL | SEQ ID No 1262 |
| LHYSVI | SEQ ID No 1263 |
| LHYTAI | SEQ ID No 1264 |
| LHYTAL | SEQ ID No 1265 |
| LHYTII | SEQ ID No 1266 |
| LHYTKV | SEQ ID No 1267 |
| LHYTLI | SEQ ID No 1268 |
| LHYTSI | SEQ ID No 1269 |
| LHYTTI | SEQ ID No 1270 |
| LHYTTV | SEQ ID No 1271 |
| LHYTVI | SEQ ID No 1272 |
| LHYTVL | SEQ ID No 1273 |
| LHYTVV | SEQ ID No 1274 |
| LHYVSI | SEQ ID No 1275 |
| LHYVTI | SEQ ID No 1276 |
| LHYVVI | SEQ ID No 1277 |
| LIYEKL | SEQ ID No 1278 |
| LIYENV | SEQ ID No 1279 |
| LIYKDL | SEQ ID No 1280 |
| LIYNSL | SEQ ID No 1281 |
| LIYSGL | SEQ ID No 1282 |
| LIYTLL | SEQ ID No 1283 |
| LIYTVL | SEQ ID No 1284 |
| LIYWEI | SEQ ID No 1285 |
| LKYCEL | SEQ ID No 1286 |
| LKYDKL | SEQ ID No 1287 |
| LKYESL | SEQ ID No 1288 |
| LKYFTI | SEQ ID No 1289 |
| LKYHTV | SEQ ID No 1290 |
| LKYILL | SEQ ID No 1291 |
| LKYIPI | SEQ ID No 1292 |
| LKYKHV | SEQ ID No 1293 |
| LKYLYL | SEQ ID No 1294 |
| LKYMEV | SEQ ID No 1295 |
| LKYMTL | SEQ ID No 1296 |
| LKYPAI | SEQ ID No 1297 |
| LKYPDV | SEQ ID No 1298 |
| LKYPEL | SEQ ID No 1299 |
| LKYQPI | SEQ ID No 1300 |
| LKYRGL | SEQ ID No 1301 |
| LKYRLL | SEQ ID No 1302 |
| LLYADL | SEQ ID No 1303 |
| LLYAPL | SEQ ID No 1304 |
| LLYAVV | SEQ ID No 1305 |
| LLYCAI | SEQ ID No 1306 |
| LLYEHV | SEQ ID No 1307 |
| LLYELL | SEQ ID No 1308 |
| LLYEQL | SEQ ID No 1309 |
| LLYGQI | SEQ ID No 1310 |
| LLYIRL | SEQ ID No 1311 |
| LLYKAL | SEQ ID No 1312 |
| LLYKFL | SEQ ID No 1313 |
| LLYKLL | SEQ ID No 1314 |
| LLYKTV | SEQ ID No 1315 |
| LLYMVV | SEQ ID No 1316 |
| LLYNAI | SEQ ID No 1317 |
| LLYNIV | SEQ ID No 1318 |
| LLYNVI | SEQ ID No 1319 |
| LLYPAI | SEQ ID No 1320 |
| LLYPLI | SEQ ID No 1321 |
| LLYPNI | SEQ ID No 1322 |
| LLYPSL | SEQ ID No 1323 |
| LLYPTI | SEQ ID No 1324 |
| LLYPVI | SEQ ID No 1325 |
| LLYPVV | SEQ ID No 1326 |
| LLYQIL | SEQ ID No 1327 |
| LLYQNI | SEQ ID No 1328 |
| LLYRLL | SEQ ID No 1329 |
| LLYRVI | SEQ ID No 1330 |
| LLYSII | SEQ ID No 1331 |
| LLYSLI | SEQ ID No 1332 |
| LLYSPV | SEQ ID No 1333 |
| LLYSRL | SEQ ID No 1334 |
| LLYSTI | SEQ ID No 1335 |
| LLYSVI | SEQ ID No 1336 |
| LLYSVV | SEQ ID No 1337 |
| LLYTTI | SEQ ID No 1338 |
| LLYTVI | SEQ ID No 1339 |
| LLYTVV | SEQ ID No 1340 |
| LLYVII | SEQ ID No 1341 |
| LLYVIL | SEQ ID No 1342 |
| LLYVTI | SEQ ID No 1343 |
| LLYWGI | SEQ ID No 1344 |
| LLYYLL | SEQ ID No 1345 |
| LLYYVI | SEQ ID No 1346 |
| LMYDNV | SEQ ID No 1347 |
| LMYMVV | SEQ ID No 1348 |
| LMYQEL | SEQ ID No 1349 |
| LMYRGI | SEQ ID No 1350 |
| LNYACL | SEQ ID No 1351 |
| LNYATI | SEQ ID No 1352 |
| LNYEVI | SEQ ID No 1353 |
| LNYGDL | SEQ ID No 1354 |
| LNYHKL | SEQ ID No 1355 |
| LNYMVL | SEQ ID No 1356 |
| LNYNIV | SEQ ID No 1357 |
| LNYPVI | SEQ ID No 1358 |
| LNYQMI | SEQ ID No 1359 |
| LNYSGV | SEQ ID No 1360 |
| LNYSVI | SEQ ID No 1361 |
| LNYTIL | SEQ ID No 1362 |
| LNYTTI | SEQ ID No 1363 |
| LNYVPI | SEQ ID No 1364 |
| LPYADL | SEQ ID No 1365 |
| LPYALL | SEQ ID No 1366 |
| LPYFNI | SEQ ID No 1367 |
| LPYFNV | SEQ ID No 1368 |
| LPYHDL | SEQ ID No 1369 |
| LPYKLI | SEQ ID No 1370 |
| LPYKTL | SEQ ID No 1371 |
| LPYLGV | SEQ ID No 1372 |
| LPYLKV | SEQ ID No 1373 |
| LPYPAL | SEQ ID No 1374 |
| LPYQVV | SEQ ID No 1375 |
| LPYRTV | SEQ ID No 1376 |
| LPYVEI | SEQ ID No 1377 |
| LPYYDL | SEQ ID No 1378 |
| LQYASL | SEQ ID No 1379 |
| LQYERI | SEQ ID No 1380 |
| LQYFAV | SEQ ID No 1381 |
| LQYFSI | SEQ ID No 1382 |
| LQYHNI | SEQ ID No 1383 |
| LQYIGL | SEQ ID No 1384 |
| LQYIKI | SEQ ID No 1385 |
| LQYLSL | SEQ ID No 1386 |
| LQYMIV | SEQ ID No 1387 |
| LQYPAI | SEQ ID No 1388 |
| LQYPLL | SEQ ID No 1389 |
| LQYPLV | SEQ ID No 1390 |
| LQYPSI | SEQ ID No 1391 |
| LQYPTL | SEQ ID No 1392 |
| LQYPVL | SEQ ID No 1393 |
| LQYRAV | SEQ ID No 1394 |
| LQYSAI | SEQ ID No 1395 |
| LQYSSI | SEQ ID No 1396 |
| LQYSVI | SEQ ID No 1397 |
| LQYTIL | SEQ ID No 1398 |
| LQYTLI | SEQ ID No 1399 |
| LQYTMI | SEQ ID No 1400 |
| LQYYQV | SEQ ID No 1401 |
| LRYAAV | SEQ ID No 1402 |
| LRYAGL | SEQ ID No 1403 |
| LRYAPL | SEQ ID No 1404 |
| LRYASI | SEQ ID No 1405 |
| LRYATI | SEQ ID No 1406 |
| LRYATV | SEQ ID No 1407 |
| LRYAVL | SEQ ID No 1408 |
| LRYCGI | SEQ ID No 1409 |
| LRYELL | SEQ ID No 1410 |
| LRYETL | SEQ ID No 1411 |
| LRYGAL | SEQ ID No 1412 |
| LRYGPI | SEQ ID No 1413 |
| LRYGTL | SEQ ID No 1414 |
| LRYHHI | SEQ ID No 1415 |
| LRYHSI | SEQ ID No 1416 |
| LRYHVL | SEQ ID No 1417 |
| LRYIAI | SEQ ID No 1418 |
| LRYIFV | SEQ ID No 1419 |
| LRYITV | SEQ ID No 1420 |
| LRYKEV | SEQ ID No 1421 |
| LRYKKL | SEQ ID No 1422 |
| LRYKMV | SEQ ID No 1423 |
| LRYKSL | SEQ ID No 1424 |
| LRYKVI | SEQ ID No 1425 |
| LRYLAI | SEQ ID No 1426 |
| LRYLDL | SEQ ID No 1427 |
| LRYLTI | SEQ ID No 1428 |
| LRYLTV | SEQ ID No 1429 |
| LRYMSI | SEQ ID No 1430 |
| LRYMVI | SEQ ID No 1431 |
| LRYNCI | SEQ ID No 1432 |
| LRYNGL | SEQ ID No 1433 |
| LRYNII | SEQ ID No 1434 |
| LRYNIL | SEQ ID No 1435 |
| LRYNKI | SEQ ID No 1436 |
| LRYNSL | SEQ ID No 1437 |
| LRYNVI | SEQ ID No 1438 |
| LRYNVL | SEQ ID No 1439 |
| LRYPFL | SEQ ID No 1440 |
| LRYPII | SEQ ID No 1441 |
| LRYPIL | SEQ ID No 1442 |
| LRYPLL | SEQ ID No 1443 |
| LRYPNI | SEQ ID No 1444 |
| LRYPSI | SEQ ID No 1445 |
| LRYPTI | SEQ ID No 1446 |
| LRYPTL | SEQ ID No 1447 |
| LRYPVI | SEQ ID No 1448 |
| LRYPVL | SEQ ID No 1449 |
| LRYQKL | SEQ ID No 1450 |
| LRYQMI | SEQ ID No 1451 |
| LRYQNL | SEQ ID No 1452 |
| LRYRLI | SEQ ID No 1453 |
| LRYRVI | SEQ ID No 1454 |
| LRYSAI | SEQ ID No 1455 |
| LRYSDL | SEQ ID No 1456 |
| LRYSII | SEQ ID No 1457 |
| LRYSMI | SEQ ID No 1458 |
| LRYSSI | SEQ ID No 1459 |
| LRYSTI | SEQ ID No 1460 |
| LRYSTL | SEQ ID No 1461 |
| LRYSVI | SEQ ID No 1462 |
| LRYSVL | SEQ ID No 1463 |
| LRYSVV | SEQ ID No 1464 |
| LRYTAI | SEQ ID No 1465 |
| LRYTIL | SEQ ID No 1466 |
| LRYTLI | SEQ ID No 1467 |
| LRYTMI | SEQ ID No 1468 |
| LRYTNL | SEQ ID No 1469 |
| LRYTPV | SEQ ID No 1470 |
| LRYTSI | SEQ ID No 1471 |
| LRYTSV | SEQ ID No 1472 |
| LRYTTI | SEQ ID No 1473 |
| LRYTTV | SEQ ID No 1474 |
| LRYTVI | SEQ ID No 1475 |
| LRYVEV | SEQ ID No 1476 |
| LRYVTI | SEQ ID No 1477 |
| LRYVTV | SEQ ID No 1478 |
| LSYDSL | SEQ ID No 1479 |
| LSYEDV | SEQ ID No 1480 |
| LSYFGV | SEQ ID No 1481 |
| LSYILI | SEQ ID No 1482 |
| LSYISV | SEQ ID No 1483 |
| LSYKQV | SEQ ID No 1484 |
| LSYKRL | SEQ ID No 1485 |
| LSYLDV | SEQ ID No 1486 |
| LSYMDL | SEQ ID No 1487 |
| LSYNAL | SEQ ID No 1488 |
| LSYNDL | SEQ ID No 1489 |
| LSYNKL | SEQ ID No 1490 |
| LSYNQL | SEQ ID No 1491 |
| LSYPVL | SEQ ID No 1492 |
| LSYQEV | SEQ ID No 1493 |
| LSYQPV | SEQ ID No 1494 |
| LSYQTI | SEQ ID No 1495 |
| LSYRSL | SEQ ID No 1496 |
| LSYRSV | SEQ ID No 1497 |
| LSYSII | SEQ ID No 1498 |
| LSYSSL | SEQ ID No 1499 |
| LSYSTL | SEQ ID No 1500 |
| LSYTKV | SEQ ID No 1501 |
| LSYTSI | SEQ ID No 1502 |
| LSYTTI | SEQ ID No 1503 |
| LSYVLI | SEQ ID No 1504 |
| LTYADL | SEQ ID No 1505 |
| LTYAEL | SEQ ID No 1506 |
| LTYAQV | SEQ ID No 1507 |
| LTYARL | SEQ ID No 1508 |
| LTYCDL | SEQ ID No 1509 |
| LTYCGL | SEQ ID No 1510 |
| LTYCVL | SEQ ID No 1511 |
| LTYEEL | SEQ ID No 1512 |
| LTYEFL | SEQ ID No 1513 |
| LTYGEV | SEQ ID No 1514 |
| LTYGRL | SEQ ID No 1515 |
| LTYKAL | SEQ ID No 1516 |
| LTYLRL | SEQ ID No 1517 |
| LTYMTL | SEQ ID No 1518 |
| LTYNTL | SEQ ID No 1519 |
| LTYPGI | SEQ ID No 1520 |
| LTYQSV | SEQ ID No 1521 |
| LTYSSV | SEQ ID No 1522 |
| LTYTTV | SEQ ID No 1523 |
| LVYDAI | SEQ ID No 1524 |
| LVYDKL | SEQ ID No 1525 |
| LVYDLV | SEQ ID No 1526 |
| LVYENL | SEQ ID No 1527 |
| LVYGQL | SEQ ID No 1528 |
| LVYHKL | SEQ ID No 1529 |
| LVYQEV | SEQ ID No 1530 |
| LVYRKV | SEQ ID No 1531 |
| LVYRNL | SEQ ID No 1532 |
| LVYSEI | SEQ ID No 1533 |
| LVYTNV | SEQ ID No 1534 |
| LVYWEI | SEQ ID No 1535 |
| LVYWKL | SEQ ID No 1536 |
| LVYWRL | SEQ ID No 1537 |
| LWYEGL | SEQ ID No 1538 |
| LWYKYI | SEQ ID No 1539 |
| LWYNHI | SEQ ID No 1540 |
| LWYTMI | SEQ ID No 1541 |
| LYYCQL | SEQ ID No 1542 |
| LYYGDL | SEQ ID No 1543 |
| LYYKKV | SEQ ID No 1544 |
| LYYLLI | SEQ ID No 1545 |
| LYYPKV | SEQ ID No 1546 |
| LYYRRV | SEQ ID No 1547 |
| LYYSTI | SEQ ID No 1548 |
| LYYVRI | SEQ ID No 1549 |
| LYYVVI | SEQ ID No 1550 |
| SAYATL | SEQ ID No 1551 |
| SAYCPL | SEQ ID No 1552 |
| SAYPAL | SEQ ID No 1553 |
| SAYQAL | SEQ ID No 1554 |
| SAYQTI | SEQ ID No 1555 |
| SAYRSV | SEQ ID No 1556 |
| SAYTAL | SEQ ID No 1557 |
| SAYTPL | SEQ ID No 1558 |
| SAYVVL | SEQ ID No 1559 |
| SCYAAV | SEQ ID No 1560 |
| SCYCII | SEQ ID No 1561 |
| SCYCLL | SEQ ID No 1562 |
| SCYDFL | SEQ ID No 1563 |
| SCYEEL | SEQ ID No 1564 |
| SCYEKI | SEQ ID No 1565 |
| SCYHIL | SEQ ID No 1566 |
| SCYPYI | SEQ ID No 1567 |
| SCYRIL | SEQ ID No 1568 |
| SCYRTL | SEQ ID No 1569 |
| SDYCNL | SEQ ID No 1570 |
| SDYEDL | SEQ ID No 1571 |
| SDYENV | SEQ ID No 1572 |
| SDYESV | SEQ ID No 1573 |
| SDYFIV | SEQ ID No 1574 |
| SDYHTL | SEQ ID No 1575 |
| SDYLAI | SEQ ID No 1576 |
| SDYLDI | SEQ ID No 1577 |
| SDYLEL | SEQ ID No 1578 |
| SDYQDL | SEQ ID No 1579 |
| SDYQRL | SEQ ID No 1580 |
| SDYSVI | SEQ ID No 1581 |
| SDYTHL | SEQ ID No 1582 |
| SEYASV | SEQ ID No 1583 |
| SEYEEL | SEQ ID No 1584 |
| SEYFEL | SEQ ID No 1585 |
| SEYGEL | SEQ ID No 1586 |
| SEYITL | SEQ ID No 1587 |
| SEYKAL | SEQ ID No 1588 |
| SEYKEL | SEQ ID No 1589 |
| SEYKGI | SEQ ID No 1590 |
| SEYLAI | SEQ ID No 1591 |
| SEYLEI | SEQ ID No 1592 |
| SEYMVI | SEQ ID No 1593 |
| SEYQSI | SEQ ID No 1594 |
| SEYRPI | SEQ ID No 1595 |
| SEYSEI | SEQ ID No 1596 |
| SEYSSI | SEQ ID No 1597 |
| SEYTPI | SEQ ID No 1598 |
| SEYTYV | SEQ ID No 1599 |
| SFYAAL | SEQ ID No 1600 |
| SFYDSL | SEQ ID No 1601 |
| SFYKGL | SEQ ID No 1602 |
| SFYLYV | SEQ ID No 1603 |
| SFYNAV | SEQ ID No 1604 |
| SFYPSV | SEQ ID No 1605 |
| SFYQQI | SEQ ID No 1606 |
| SFYQQL | SEQ ID No 1607 |
| SFYSAL | SEQ ID No 1608 |
| SFYSDI | SEQ ID No 1609 |
| SFYSKL | SEQ ID No 1610 |
| SFYSRV | SEQ ID No 1611 |
| SFYWNV | SEQ ID No 1612 |
| SFYYLI | SEQ ID No 1613 |
| SGYAQL | SEQ ID No 1614 |
| SGYATL | SEQ ID No 1615 |
| SGYEKL | SEQ ID No 1616 |
| SGYQLV | SEQ ID No 1617 |
| SGYQRI | SEQ ID No 1618 |
| SGYRRL | SEQ ID No 1619 |
| SGYSHL | SEQ ID No 1620 |
| SGYSQL | SEQ ID No 1621 |
| SGYTLI | SEQ ID No 1622 |
| SGYTRI | SEQ ID No 1623 |
| SGYYRV | SEQ ID No 1624 |
| SHYADV | SEQ ID No 1625 |
| SHYFPL | SEQ ID No 1626 |
| SHYIDI | SEQ ID No 1627 |
| SHYKRL | SEQ ID No 1628 |
| SHYQVV | SEQ ID No 1629 |
| SIYAPL | SEQ ID No 1630 |
| SIYATL | SEQ ID No 1631 |
| SIYEEL | SEQ ID No 1632 |
| SIYEEV | SEQ ID No 1633 |
| SIYELL | SEQ ID No 1634 |
| SIYEVL | SEQ ID No 1635 |
| SIYGDL | SEQ ID No 1636 |
| SIYKKL | SEQ ID No 1637 |
| SIYLNI | SEQ ID No 1638 |
| SIYLVI | SEQ ID No 1639 |
| SIYRYI | SEQ ID No 1640 |
| SIYSWI | SEQ ID No 1641 |
| SKYKEI | SEQ ID No 1642 |
| SKYKIL | SEQ ID No 1643 |
| SKYKSL | SEQ ID No 1644 |
| SKYLAV | SEQ ID No 1645 |
| SKYLGV | SEQ ID No 1646 |
| SKYNIL | SEQ ID No 1647 |
| SKYQAV | SEQ ID No 1648 |
| SKYSDI | SEQ ID No 1649 |
| SKYSSL | SEQ ID No 1650 |
| SKYVGL | SEQ ID No 1651 |
| SKYVSL | SEQ ID No 1652 |
| SLYANI | SEQ ID No 1653 |
| SLYAQV | SEQ ID No 1654 |
| SLYAYI | SEQ ID No 1655 |
| SLYDDL | SEQ ID No 1656 |
| SLYDFL | SEQ ID No 1657 |
| SLYDNL | SEQ ID No 1658 |
| SLYDSI | SEQ ID No 1659 |
| SLYDYL | SEQ ID No 1660 |
| SLYEGL | SEQ ID No 1661 |
| SLYEHI | SEQ ID No 1662 |
| SLYELL | SEQ ID No 1663 |
| SLYHCL | SEQ ID No 1664 |
| SLYHKL | SEQ ID No 1665 |
| SLYIGI | SEQ ID No 1666 |
| SLYKKL | SEQ ID No 1667 |
| SLYKNL | SEQ ID No 1668 |
| SLYLAI | SEQ ID No 1669 |
| SLYLGI | SEQ ID No 1670 |
| SLYNAL | SEQ ID No 1671 |
| SLYNLL | SEQ ID No 1672 |
| SLYRNI | SEQ ID No 1673 |
| SLYSDV | SEQ ID No 1674 |
| SLYTCV | SEQ ID No 1675 |
| SLYTTL | SEQ ID No 1676 |
| SLYVAI | SEQ ID No 1677 |
| SLYVDV | SEQ ID No 1678 |
| SLYVSI | SEQ ID No 1679 |
| SLYYAL | SEQ ID No 1680 |
| SLYYNI | SEQ ID No 1681 |
| SLYYPI | SEQ ID No 1682 |
| SMYDGL | SEQ ID No 1683 |
| SMYEDI | SEQ ID No 1684 |
| SMYNEI | SEQ ID No 1685 |
| SMYQSV | SEQ ID No 1686 |
| SMYTWL | SEQ ID No 1687 |
| SMYVSI | SEQ ID No 1688 |
| SNYENL | SEQ ID No 1689 |
| SNYGSL | SEQ ID No 1690 |
| SNYGTI | SEQ ID No 1691 |
| SNYLVL | SEQ ID No 1692 |
| SNYQEI | SEQ ID No 1693 |
| SNYRLL | SEQ ID No 1694 |
| SNYRTL | SEQ ID No 1695 |
| SNYSDI | SEQ ID No 1696 |
| SNYSLL | SEQ ID No 1697 |
| SPYAEI | SEQ ID No 1698 |
| SPYATL | SEQ ID No 1699 |
| SPYEKV | SEQ ID No 1700 |
| SPYGDI | SEQ ID No 1701 |
| SPYGGL | SEQ ID No 1702 |
| SPYNTL | SEQ ID No 1703 |
| SPYPGI | SEQ ID No 1704 |
| SPYPGV | SEQ ID No 1705 |
| SPYQEL | SEQ ID No 1706 |
| SPYRSV | SEQ ID No 1707 |
| SPYSRL | SEQ ID No 1708 |
| SPYTDV | SEQ ID No 1709 |
| SPYTSV | SEQ ID No 1710 |
| SPYVVI | SEQ ID No 1711 |
| SQYCVL | SEQ ID No 1712 |
| SQYEAL | SEQ ID No 1713 |
| SQYKRL | SEQ ID No 1714 |
| SQYLAL | SEQ ID No 1715 |
| SQYLRL | SEQ ID No 1716 |
| SQYMHV | SEQ ID No 1717 |
| SQYSAV | SEQ ID No 1718 |
| SQYTSI | SEQ ID No 1719 |
| SQYWRL | SEQ ID No 1720 |
| SRYAEL | SEQ ID No 1721 |
| SRYATL | SEQ ID No 1722 |
| SRYESL | SEQ ID No 1723 |
| SRYGLL | SEQ ID No 1724 |
| SRYLSL | SEQ ID No 1725 |
| SRYMEL | SEQ ID No 1726 |
| SRYMRI | SEQ ID No 1727 |
| SRYPPV | SEQ ID No 1728 |
| SRYQAL | SEQ ID No 1729 |
| SRYQQL | SEQ ID No 1730 |
| SRYRFI | SEQ ID No 1731 |
| SRYRFV | SEQ ID No 1732 |
| SRYSAL | SEQ ID No 1733 |
| SRYSDL | SEQ ID No 1734 |
| SRYTGL | SEQ ID No 1735 |
| SRYVRL | SEQ ID No 1736 |
| SSYDEL | SEQ ID No 1737 |
| SSYEAL | SEQ ID No 1738 |
| SSYEIV | SEQ ID No 1739 |
| SSYEPL | SEQ ID No 1740 |
| SSYGRL | SEQ ID No 1741 |
| SSYGSI | SEQ ID No 1742 |
| SSYGSL | SEQ ID No 1743 |
| SSYHII | SEQ ID No 1744 |
| SSYHIL | SEQ ID No 1745 |
| SSYHKL | SEQ ID No 1746 |
| SSYHNI | SEQ ID No 1747 |
| SSYIKV | SEQ ID No 1748 |
| SSYNSV | SEQ ID No 1749 |
| SSYQEI | SEQ ID No 1750 |
| SSYRKV | SEQ ID No 1751 |
| SSYRRV | SEQ ID No 1752 |
| SSYSDI | SEQ ID No 1753 |
| SSYTPL | SEQ ID No 1754 |
| SSYTRL | SEQ ID No 1755 |
| SSYTSV | SEQ ID No 1756 |
| SSYTTI | SEQ ID No 1757 |
| SSYVKL | SEQ ID No 1758 |
| STYAEV | SEQ ID No 1759 |
| STYAGI | SEQ ID No 1760 |
| STYAHL | SEQ ID No 1761 |
| STYALV | SEQ ID No 1762 |
| STYAPI | SEQ ID No 1763 |
| STYDHV | SEQ ID No 1764 |
| STYDKV | SEQ ID No 1765 |
| STYDQV | SEQ ID No 1766 |
| STYDRI | SEQ ID No 1767 |
| STYEEL | SEQ ID No 1768 |
| STYEYL | SEQ ID No 1769 |
| STYILV | SEQ ID No 1770 |
| STYLPL | SEQ ID No 1771 |
| STYMAV | SEQ ID No 1772 |
| STYQTL | SEQ ID No 1773 |
| STYRKL | SEQ ID No 1774 |
| STYSQL | SEQ ID No 1775 |
| STYTSI | SEQ ID No 1776 |
| STYYQV | SEQ ID No 1777 |
| SVYATL | SEQ ID No 1778 |
| SVYCFL | SEQ ID No 1779 |
| SVYCNL | SEQ ID No 1780 |
| SVYDSV | SEQ ID No 1781 |
| SVYDTI | SEQ ID No 1782 |
| SVYEKV | SEQ ID No 1783 |
| SVYEML | SEQ ID No 1784 |
| SVYGSV | SEQ ID No 1785 |
| SVYPII | SEQ ID No 1786 |
| SVYQPI | SEQ ID No 1787 |
| SVYRKV | SEQ ID No 1788 |
| SVYSHL | SEQ ID No 1789 |
| SVYSRV | SEQ ID No 1790 |
| SVYTAL | SEQ ID No 1791 |
| SVYTEL | SEQ ID No 1792 |
| SVYWKV | SEQ ID No 1793 |
| SWYDSI | SEQ ID No 1794 |
| SWYFTV | SEQ ID No 1795 |
| SYYKAI | SEQ ID No 1796 |
| SYYLKL | SEQ ID No 1797 |
| SYYSFV | SEQ ID No 1798 |
| SYYVTI | SEQ ID No 1799 |
| VAYADL | SEQ ID No 1800 |
| VAYARI | SEQ ID No 1801 |
| VAYARV | SEQ ID No 1802 |
| VAYDQL | SEQ ID No 1803 |
| VAYGHV | SEQ ID No 1804 |
| VAYKQV | SEQ ID No 1805 |
| VAYKRL | SEQ ID No 1806 |
| VAYNLL | SEQ ID No 1807 |
| VAYQRV | SEQ ID No 1808 |
| VAYSGV | SEQ ID No 1809 |
| VAYSQV | SEQ ID No 1810 |
| VCYCIV | SEQ ID No 1811 |
| VCYGLV | SEQ ID No 1812 |
| VCYGRL | SEQ ID No 1813 |
| VCYIVV | SEQ ID No 1814 |
| VCYLLV | SEQ ID No 1815 |
| VDYDCI | SEQ ID No 1816 |
| VDYDFL | SEQ ID No 1817 |
| VDYFTI | SEQ ID No 1818 |
| VDYFVL | SEQ ID No 1819 |
| VDYGEL | SEQ ID No 1820 |
| VDYILV | SEQ ID No 1821 |
| VDYIQV | SEQ ID No 1822 |
| VDYKNI | SEQ ID No 1823 |
| VDYMSI | SEQ ID No 1824 |
| VDYNLV | SEQ ID No 1825 |
| VDYPDV | SEQ ID No 1826 |
| VDYSDL | SEQ ID No 1827 |
| VDYSSV | SEQ ID No 1828 |
| VDYTTL | SEQ ID No 1829 |
| VDYVDV | SEQ ID No 1830 |
| VDYVGV | SEQ ID No 1831 |
| VDYVIL | SEQ ID No 1832 |
| VDYVQV | SEQ ID No 1833 |
| VEYAPL | SEQ ID No 1834 |
| VEYDPL | SEQ ID No 1835 |
| VEYGTI | SEQ ID No 1836 |
| VEYHRL | SEQ ID No 1837 |
| VEYLEV | SEQ ID No 1838 |
| VEYQLL | SEQ ID No 1839 |
| VEYRPL | SEQ ID No 1840 |
| VEYSSI | SEQ ID No 1841 |
| VEYSTV | SEQ ID No 1842 |
| VFYAEI | SEQ ID No 1843 |
| VFYLAV | SEQ ID No 1844 |
| VFYRQV | SEQ ID No 1845 |
| VFYVGV | SEQ ID No 1846 |
| VFYYVI | SEQ ID No 1847 |
| VFYYVL | SEQ ID No 1848 |
| VGYETI | SEQ ID No 1849 |
| VHYALL | SEQ ID No 1850 |
| VHYARL | SEQ ID No 1851 |
| VHYETL | SEQ ID No 1852 |
| VHYGGV | SEQ ID No 1853 |
| VHYHSL | SEQ ID No 1854 |
| VHYIPV | SEQ ID No 1855 |
| VHYKEI | SEQ ID No 1856 |
| VHYLQV | SEQ ID No 1857 |
| VHYNSL | SEQ ID No 1858 |
| VHYQSV | SEQ ID No 1859 |
| VHYRSL | SEQ ID No 1860 |
| VIYAQL | SEQ ID No 1861 |
| VIYDRL | SEQ ID No 1862 |
| VIYENV | SEQ ID No 1863 |
| VIYEPL | SEQ ID No 1864 |
| VIYERL | SEQ ID No 1865 |
| VIYIDV | SEQ ID No 1866 |
| VIYKKI | SEQ ID No 1867 |
| VIYKRI | SEQ ID No 1868 |
| VIYPFL | SEQ ID No 1869 |
| VIYPNI | SEQ ID No 1870 |
| VIYSDL | SEQ ID No 1871 |
| VIYSML | SEQ ID No 1872 |
| VIYSSV | SEQ ID No 1873 |
| VIYSWI | SEQ ID No 1874 |
| VKYADI | SEQ ID No 1875 |
| VKYARL | SEQ ID No 1876 |
| VKYATL | SEQ ID No 1877 |
| VKYEGL | SEQ ID No 1878 |
| VKYGDL | SEQ ID No 1879 |
| VKYGSV | SEQ ID No 1880 |
| VKYLLV | SEQ ID No 1881 |
| VKYNPV | SEQ ID No 1882 |
| VKYPPI | SEQ ID No 1883 |
| VKYQRL | SEQ ID No 1884 |
| VKYQVI | SEQ ID No 1885 |
| VKYSEV | SEQ ID No 1886 |
| VKYSNV | SEQ ID No 1887 |
| VKYSRL | SEQ ID No 1888 |
| VKYSTL | SEQ ID No 1889 |
| VKYVDL | SEQ ID No 1890 |
| VLYADI | SEQ ID No 1891 |
| VLYAML | SEQ ID No 1892 |
| VLYASV | SEQ ID No 1893 |
| VLYCLL | SEQ ID No 1894 |
| VLYCLV | SEQ ID No 1895 |
| VLYCVL | SEQ ID No 1896 |
| VLYDCL | SEQ ID No 1897 |
| VLYFHI | SEQ ID No 1898 |
| VLYFTV | SEQ ID No 1899 |
| VLYGDL | SEQ ID No 1900 |
| VLYGQL | SEQ ID No 1901 |
| VLYPMV | SEQ ID No 1902 |
| VLYPRL | SEQ ID No 1903 |
| VLYPRV | SEQ ID No 1904 |
| VLYSEL | SEQ ID No 1905 |
| VLYSRV | SEQ ID No 1906 |
| VLYTAV | SEQ ID No 1907 |
| VLYTIL | SEQ ID No 1908 |
| VMYDAV | SEQ ID No 1909 |
| VNYESI | SEQ ID No 1910 |
| VNYSAL | SEQ ID No 1911 |
| VNYSKI | SEQ ID No 1912 |
| VNYSSI | SEQ ID No 1913 |
| VPYALL | SEQ ID No 1914 |
| VPYDTL | SEQ ID No 1915 |
| VPYEDV | SEQ ID No 1916 |
| VPYEEL | SEQ ID No 1917 |
| VPYKTI | SEQ ID No 1918 |
| VPYLRV | SEQ ID No 1919 |
| VPYNDL | SEQ ID No 1920 |
| VPYPAL | SEQ ID No 1921 |
| VPYQEL | SEQ ID No 1922 |
| VPYRLL | SEQ ID No 1923 |
| VPYSEL | SEQ ID No 1924 |
| VPYTLL | SEQ ID No 1925 |
| VPYTPL | SEQ ID No 1926 |
| VPYTTL | SEQ ID No 1927 |
| VPYVEL | SEQ ID No 1928 |
| VPYVMV | SEQ ID No 1929 |
| VPYVSL | SEQ ID No 1930 |
| VQYKAV | SEQ ID No 1931 |
| VQYKEI | SEQ ID No 1932 |
| VQYNIV | SEQ ID No 1933 |
| VQYRPV | SEQ ID No 1934 |
| VQYSQI | SEQ ID No 1935 |
| VQYSTV | SEQ ID No 1936 |
| VQYTEV | SEQ ID No 1937 |
| VQYYNI | SEQ ID No 1938 |
| VRYARL | SEQ ID No 1939 |
| VRYDNL | SEQ ID No 1940 |
| VRYGRI | SEQ ID No 1941 |
| VRYKKL | SEQ ID No 1942 |
| VRYKRV | SEQ ID No 1943 |
| VRYLDV | SEQ ID No 1944 |
| VRYRTI | SEQ ID No 1945 |
| VRYSDI | SEQ ID No 1946 |
| VRYTQL | SEQ ID No 1947 |
| VRYVCL | SEQ ID No 1948 |
| VSYAEL | SEQ ID No 1949 |
| VSYASV | SEQ ID No 1950 |
| VSYEPI | SEQ ID No 1951 |
| VSYGDI | SEQ ID No 1952 |
| VSYIGL | SEQ ID No 1953 |
| VSYILV | SEQ ID No 1954 |
| VSYMML | SEQ ID No 1955 |
| VSYNNI | SEQ ID No 1956 |
| VSYNNL | SEQ ID No 1957 |
| VSYQEI | SEQ ID No 1958 |
| VSYQPI | SEQ ID No 1959 |
| VSYSAV | SEQ ID No 1960 |
| VSYSFL | SEQ ID No 1961 |
| VSYSLV | SEQ ID No 1962 |
| VSYSPV | SEQ ID No 1963 |
| VSYTML | SEQ ID No 1964 |
| VSYTNL | SEQ ID No 1965 |
| VSYTPL | SEQ ID No 1966 |
| VSYVKI | SEQ ID No 1967 |
| VSYVLL | SEQ ID No 1968 |
| VTYADL | SEQ ID No 1969 |
| VTYAEL | SEQ ID No 1970 |
| VTYAEV | SEQ ID No 1971 |
| VTYAKV | SEQ ID No 1972 |
| VTYAPV | SEQ ID No 1973 |
| VTYAQL | SEQ ID No 1974 |
| VTYATL | SEQ ID No 1975 |
| VTYATV | SEQ ID No 1976 |
| VTYGNI | SEQ ID No 1977 |
| VTYITI | SEQ ID No 1978 |
| VTYQII | SEQ ID No 1979 |
| VTYQIL | SEQ ID No 1980 |
| VTYQLL | SEQ ID No 1981 |
| VTYSAL | SEQ ID No 1982 |
| VTYSTL | SEQ ID No 1983 |
| VTYTLL | SEQ ID No 1984 |
| VTYTQL | SEQ ID No 1985 |
| VTYVNL | SEQ ID No 1986 |
| VVYADI | SEQ ID No 1987 |
| VVYEDV | SEQ ID No 1988 |
| VVYFCL | SEQ ID No 1989 |
| VVYKTL | SEQ ID No 1990 |
| VVYQKL | SEQ ID No 1991 |
| VVYSEV | SEQ ID No 1992 |
| VVYSQV | SEQ ID No 1993 |
| VVYSVV | SEQ ID No 1994 |
| VVYTVL | SEQ ID No 1995 |
| VVYYRI | SEQ ID No 1996 |
| VYYHWL | SEQ ID No 1997 |
| VYYLPL | SEQ ID No 1998 |

[0285] In some embodiments, the ITIM, or at least one of the ITIMs when several ITIMs are present in the intracellular domain is selected from LSYRSL, LPYYDL, LLYSRL, LIYTLL, LLYADL, ISYTTL, VTYSAL, IHYSEL, VDYVIL, LHYASL, LDYDYL, VDYDFL, VTYSTL, IIYSEV, LEYLCL, VLYGQL, VPYTPL, ISYPML, VSYTNL, LLYEMV, VDYNLV, ITYFAL, VHYQSV, VPYVMV, IPYRTV, IAYSLL, VCYGRL, LKYLYL, LLYEHV, ITYSLL, VLYSEL, IWYNIL, ISYKGL, IDYYNL, LEYLQL, LKYRGL, VLYASV, LQYLSL, LFYRHL, VOYKAV, LSYSSL, LSYTKV, VQYSTV, VKYNPV, VVYSEV, LEYVSV, LAYHTV, VQYLRL, VTYTQL, IVYTEL, IVYAEL, VTYAQL, ILYTEL, ITYAAV, VIYIDV, VTYAEV, VTYAPV, VTYAKV, VTYARL, ILYHTV, VLYAML, VIYAQL, LVYENL, LCYADL, ISYASL, LTYVLL, VTYVNL, VRYSIV, VFYRQV, LKYMEV, VDYGEL, LSYMDL, VLYTAV, VQYTEV, IVYASL, VEYLEV, LEYVDL, ITYADL, LTYADL, VIYENV, LAYYTV, VSYSAV, LVYDKL, LNYMVL, LNYACL, LDYINV, LHYATL, LHYAVL, IQYAPL, IQYASL, LLYLLL, VVYSQV, VIYSSV, VVYYRV, VPYVEL, LDYDKL, LSYPVL, VAYSQV, LFYWDV, LIYSQV, or LDYEFL.

[0286] In some embodiments, p is 1, 2, 3, 4, 5, 6, 7, 8, 9, 10, 11, 12, 13, 14, 15, 16, 17, 18, 19 or 20. In some embodiments, p is 1, 2, 3, 4, 5, 6, 7, 8, 9, or 10. In some embodiments, p is 1, 2, 3, 4 or 5. In some embodiments, p is 1. In some embodiments, p is 2. In some embodiments, p is 3. In some embodiments, p is 4. In some embodiments, p is 5.

[0287] In some embodiments, n is 1, 2, 3, 4, 5, 6, 7, 8, 9, or 10. In some embodiments, n is 1, 2, 3, 4 or 5. In some embodiments, n is 0. In some embodiments, n is 1. In some embodiments, n is 2. In some embodiments, n is 3.

[0288] In some embodiments, m is 1, 2, 3, 4, 5, 6, 7, 8, 9, 10, 11, 12, 13, 14, 15, 16, 17, 18, 19 or 20. In some embodiments, m is 1, 2, 3, 4, 5, 6, 7, 8, 9, or 10. In some embodiments, m is 1, 2, 3, 4 or 5. In some embodiments, m is 1. In some embodiments, m is 2. In some embodiments, m is 3. In some embodiments, m is 4. In some embodiments, m is 5.

[0289] In some embodiments, n is 1 and m is 1.

[0290] In some embodiments, n is 1 and m is 1 and p is 1 to 10.

[0291] In some embodiments, n is 1 and m is 1 and p is 1.

[0292] In some embodiments, n is 0 and m is 1 and p is 1 to 20.

[0293] In some embodiments, n is 0, m is 1 to 6 and p is 1.

[0294] In some embodiments, n is 0, m is 1 and p is 1.

[0295] In some embodiments, n is 0, m is 2 and p is 1.

[0296] In some embodiments, n is 0, m is 3 and p is 1.

[0297] In some embodiments, n is 0, m is 4 and p is 1.

[0298] In some embodiments, n is 0, m is 5 and p is 1.

[0299] In some embodiments, n is 0, m is 6 and p is 1.

[0300] In some embodiments, n is 0, m is 1 to 6 and p is 1 and ITSM is TEYATI.

[0301] In some embodiments, n is 0, m is 1 to 6 and p is 1 and ITSM is TEYSEI.

[0302] In some embodiments, n is 0, m is 1 to 6 and p is 1 and ITSM is TVYSEV.

[0303] In some embodiments, n is 1, m is 1 and p is 1 to 5.

[0304] In some embodiments, n is 1, m is 1 and p is 1.

[0305] In some embodiments, n is 1, m is 1 and p is 2.

[0306] In some embodiments, n is 1, m is 1 and p is 3.

[0307] In some embodiments, n is 1, m is 1 and p is 4.

[0308] In some embodiments, n is 1, m is 1 and p is 5.

[0309] In some embodiments, n is 1, m is 1 and p is 1 to 5 and ITIM is VDYGEL and ITSM is TEYATI.

[0310] In some embodiments, n is 1, m is 1 and p is 1 to 5 and ITIM is LX₆YAX₈L wherein X₆ is selected from H or Q and X₈ is V or S, and ITSM is TEYSEI.

[0311] In some embodiments, n is 1, m is 1 and p is 1 to 5 and ITIM is LX₆YAX₈L wherein X₆ is selected from H or Q and X₈ is V or S, and ITSM is TEYASI.

[0312] In some embodiments, n is 1, m is 1 and p is 1 to 5 and ITIM is LX₆YAX₈L wherein X₆ is selected from H or Q and X₈ is V or S, and ITSM is TVYSEV.

[0313] In some embodiments, the intracellular domain comprises several ITSMs having the same amino acid sequence.

[0314] In some embodiments, the intracellular domain comprises several ITSMs having different amino acid sequences.

[0315] In some embodiments, the intracellular domain comprises several ITIMs having the same amino acid sequence.

[0316] In some embodiments, the intracellular domain comprises several ITIMs having different amino acid sequences.

[0317] In some embodiments, the intracellular domain of the NCAR is selected from SEQ ID No 2000, SEQ ID No 2001, SEQ ID No 2002, SEQ ID No 2003, SEQ ID No 2004, SEQ ID No 2005, SEQ ID No 2006, SEQ ID No 2007, SEQ ID No 2008, SEQ ID No 2009, SEQ ID No 2010, SEQ ID No 2011, SEQ ID No 2012, SEQ ID No 2013, SEQ ID No 2014, SEQ ID No 2015, SEQ ID No 2016 and SEQ ID No 2017.

TABLE 1
Naturally occurring N-terminal flanking region of ITIM.*ITSM
intracellular domains varying in length from 1-520 (Table 1
comprises SEQ ID No 1 to SEQ ID No 36)

| N | |
|---|---|
| ELFANKRKYT | SEQ ID No 1 |
| RKRNNSRLGNG | SEQ ID No 2 |
| YRHRKKRNGLT | SEQ ID No 3 |
| YKMYGSEMLHKRDPLDEDEDTD | SEQ ID No 4 |
| LRKRRDSLSLSTQRTQGPAESARN | SEQ ID No 5 |
| WRMMKYQQKAAGMSPEQVLQPLEGD | SEQ ID No 6 |
| CSRAARGTIGARRTGQPLKEDPSAVPVFS | SEQ ID No 7 |
| RIRQKKAQGSTSSTRLHEPEKNAREITQDTND | SEQ ID No 8 |
| NNSYQEIEEDADVEWKFARAKLWLSYFDEGRTLPAPFNLVPSPK | SEQ ID No 9 |
| WLHRRLPPQPIRPLPRFAPLVKTEPQRPVKEEEPKIPGDLDQEPS | SEQ ID No 10 |
| SNKCDVVVVGGGISGMAAAKLLHDSGLNVVVLEARDRVGGRTYTLRNQK | SEQ ID No 11 |
| KTHRRKAARTAVGRNDTHPTTGSASPKHQKKSKLHGPTETSSCSGAAPT | SEQ ID No 12 |
| VEMDEE | |
| RVKTRRKKAAQPVQNTDDVNPVMVSGSRGHQHQFQTGIVSDHPAEAGPI | SEQ ID No 13 |
| SEDEQE | |
| KARRKQAAGRPEKMDDEDPIMGTITSGSRKKPWPDSPGDQASPPGDAP | SEQ ID No 14 |
| PLEEQKE | |
| KICRKEARKRAAAEQDVPSTLGPISQGHQHECSAGSSQDHPPPGAATYT | SEQ ID No 15 |
| PGKGEEQE | |
| MENQEKASIAGHMFDVVVIGGGISGLSAAKLLTEYGVSVLVLEARDRVG | SEQ ID No 16 |
| GRTYTIRNEH | |
| VRSCRKKSARPAAGVGDTGIEDANAVRGSASQGPLTEPWAEDSPPDQP | SEQ ID No 17 |
| PPASARSSVGEGE | |
| KCYFLRKAKAKQMPVEMSRPAVPLLNSNNEKMSDPNMEANSHYGHNDD | SEQ ID No 18 |
| VRNHAMKPINDNKEPLNSD | |
| VRLRLQKHRPPADPCRGETETMNNLANCQREKDISVSIIGATQIKNTNK | SEQ ID No 19 |
| KADFHGDHSADKNGFKARYPA | |
| RRHQGKQNELSDTAGREINLVDAHLKSEQTEASTRQNSQVLLSETGIYDN | SEQ ID No 20 |
| DPDLCFRMQEGSEVYSNPCLEENKPG | |
| QSVFNKRKSRVRHYLVKCPQNSSGETVTSVTSLAPLQPKKGKRQKEKPDI | SEQ ID No 21 |
| PPAVPAKAPIAPTFHKPKLLKPQRKVTLPKIAEEN | |
| MSDKMSSFLHIGDICSLYAEGSTNGFISTLGLVDDRCVVQPETGDLNNPP | SEQ ID No 22 |
| KKFRDCLFKLCPMNRYSAQKQFWKAAKPGANSTTDAVLLNKLHHAADLE | |
| KKQNETENRKLLGTV | |
| MTEKMSSFLYIGDIVSLYAEGSVNGFISTLGLVDDRCVVHPEAGDLANPP | SEQ ID No 23 |
| KKFRDCLFKVCPMNRYSAQKQYWKAKQAKQGNHTEAALLKKLQHAAELE | |
| QKQNESENKKLLGEI | |
| MSEMSSFLHIGDIVSLYAEGSVNGFISTLGLVDDRCVVEPAAGDLDNPPK | SEQ ID No 24 |
| KFRDCLFKVCPMNRYSAQKQYWKAKQTKQDKEKIADVVLLQKLQHAAQME | |
| QKQNDTENKKVHGDV | |
| NCVSCCKDPEIDFKEFEDNFDDEIDFTPPAEDTPSVQSPAEVFTLSVPNI | SEQ ID No 25 |
| SLPAPSQFQPSVEGLKSQVARHSLNYIQEIGNGWFGKVLLGEIYTGTSVA | |
| RVIVKELKASANPKEQDTFLKNGEPYYILQHPNILQCVGQCVEA | |
| KRVQETKFGNAFTEEDSELVVNYIAKKSFCRRAIELTLHSLGVSEELQNK | SEQ ID No 26 |
| LEDVVIDRNLLILGKILGEGEF | |
| GSVMEGNLKQEDGTSLKVAVKTMKLDNSSQREIEEFLSEAACMKDFSHP | |
| NVIRLLGVCIEMSSQGIPKPMVILPFMKYGDLHTY | |
| HRRKKETRYGEVFEPTVERGELVVRYRVRKSYSRRTTEATLNSLGISEEL | SEQ ID No 27 |
| KEKLRDVMVDRHKVALGKTLGEGEFGAVMEGQLNQDDSILKVAVKTMKIA | |
| ICTRSELEDFLSEAVCMKEFDHPNVMRLIGVCFQGSERESFPAPVVILPF | |
| MKHGDLHSF | |
| MSGGASATGPRRGPPGLEDTTSKKKQKDRANQESKDGDPRKETGSRYV | SEQ ID No 28 |
| AQAGLEPLASGDPSASASHAAGITGSRHRTRLFFPSSSGSASTPQEEQTK | |
| EGACEDPHDLLATPTPELLLDWRQSAEEVIVKLRVGVGPLQLEDVDAAFT | |
| DTDCVVRFAGGQQWGG | |
| AYKRKSRESDLTLKRLQMQMDNLESRVALECKEAFAELQTDIHELTSDLD | SEQ ID No 29 |
| GAGIPFLDYRTYTMRVLFPGIEDHPVLRDLEVPGYRQERVEKGLKLFAQLI | |
| NNKVFLLSFIRTLESQRSFSMRDRGNVASLIMTVLQSKLEYATDVLKQLLA | |
| DLIDKNLESKNHPKLLLRRTESVAEKMLTNWFTF | |
| YKRKTQDADRTLKRLQLQMDNLESRVALECKEAFAELQTDINELTNHMDE | SEQ ID No 30 |
| VQIPFLDYRTYAVRVLFPGIEAHPVLKELDTPPNVEKALRLFGQLLHSRA | |
| FVLTFIHTLEAQSSFSMRDRGTVASLTMVALQSRLDYATGLLKQLLADLI | |
| EKNLESKNHPKLLLRRTESVAEKMLTNWFTFLLHKFLKECAGEPLF | |
| RWHCPRRLLGACWTLNGQEEPVSQPTPQLENEVSRQHLPATLPEMVAF | SEQ ID No 31 |
| YQELHTPTQGQTMVRQLMHKLLVFSAREVDHRGGCLMLQDTGISLLIPPG | |
| AVAVGRQERVSLILVWDLSDAPSLSQAQGLVSPVVACGPHGASFLKPCTL | |
| TFKHCAEQPSHARTYSSNTTLLDAKVWRPLGRPGAHASRDECRIHLSHF | |
| KQKPRYEIRWRVIESISPDGHEYIYVDPMQLPYDSRWEFPRDGLVLGRVL | SEQ ID No 32 |
| GSGAFGKVVEGTAYGLSRSQPVMKVAVKMLKPTARSSEKQALMSELKIM | |
| THLGPHLNIVNLLGACTKSGPIYIITEYCFYGDLVNYLHKNRDSFLSHHP | |
| EKPKKELDIFGLNPADESTRSYVILSFENNGDYMDMKQADTTQYVPMLER | |
| KEV | |
| MFNYTFQQVQEHTDQIWKFQRHDLIEEYHGRPAAPPPFILLSHLQLFIKR | SEQ ID No 33 |
| VVLKTPAKRHKQLKNKLEKNEEAALLSWEIYLKENYLQNRQFQQKQRPEQ | |
| KIEDISNKVDAMVDLLDLDPLKRSGSMEQRLASLEEQVAQTAQALHWIVR | |
| TLRASGFSSEADVPTLASQKAAEEPDAEPGGRKKTEEPGDSYHVNARHLL | |
| YPNCPVTRFPVPNEKVPWETEFLIYDPPFYTAERKDAAAMDPMGDTLEPL | |
| ST | |
| CCDCGGAPRSAAGFEPVPECSDGAIHSWAVEGPQPEPRDITTVIPQIPPD | SEQ ID No 34 |
| NANIIECIDNSGVYTNEYGGREMQDLGGGERMTGFELTEGVKTSGMPEIC | |
| QEYSGTLRRNSMRECREGGLNMNFMESYFCQKAYAYADEDEGRPSNDC | |
| LLIYDIEGVGSPAGSVGCCSFIGEDLDDSFLDTLGPKFKKLADISLGKE | |
| SYPDLDPSWPPQSTEPVCLPQETEPVVSGHPPISPHFGTTTVISESTYP | |
| SGPGVLHPKPILDP | |
| MADGGEGEDEIQFLRTDDEVVLQCTATIHKEQQKLCLAAEGFGNRLCFLE | SEQ ID No 35 |
| STSNSKNVPPDLSICTFVLEQSLSVRALQEMLANTVEKSEGQVDVEKWKF | |
| MMKTAQGGGHRTLLYGHAILLRHSYSGMYLCCLSTSRSSTDKLAFDVGL | |
| QEDTTGEACWWTIHPASKQRSEGEKVRVGDDLILVSVSSERYLHLSYGN | |
| GSLHVDAAFQQTLWSVAPISSGSEAAQGYLIGGDVLRLLHGHMDECLTVP | |
| SGEHGEEQRRTVHYEGGAVSVHARSLWRLETLRVAWSGSHIRWGQPFR | |
| LRHVTTGKYLSLMEDKNLLLMDKEKADVKSTAFTFRSSKEKLDVGVRKEV | |
| DGMGTSEIKYGDSVCYIQHVDTGLW | |
| MGDAEGEDEVQFLRTDDEVVLQCSATVLKEQLKLCLAAEGFGNRLCFLE | SEQ ID No 36 |
| PTSNAQNVPPDLAICCFVLEQSLSVRALQEMLANTVEAGVESSQGGGHR | |
| TLLYGHAILLRHAHSRMYLSCLTTSRSMTDKLAFDVGLQEDATGEACWWT | |
| MHPASKQRSEGEKVRVGDDIILVSVSSERYLHLSTASGELQVDASFMQTL | |
| WNMNPICSRCEEGFVTGGHVLRLFHGHMDECLTISPADSDDQRRLVYYE | |
| GGAVCTHARSLWRLEPLRISWSGSHLRWGQPLRVRHVTTGQYLALTEDQ | |
| GLVVVDASKAHTKATSFCFRISKEKLDVAPKRDVEGMGPPEIKYGESLCF | |
| VQHVASGLWLTYAAPDPKALRLGVLKKKAMLHQEGHMDDALSLTRCQQE | |
| ESQAARMIHSTNGLYNQFIKSLDSFSGKPRGSGPPAGTALPIEGVILSLQ | |
| DLIIYFEPPSEDLQHEEKQSKLRSLRNRQSLFQEEGMLSMVLNCIDRLN | |
| VYTTAAHFAEFAGEEAAESWKEIVN | |

TABLE 2
Examples of intracellular domains of known inhibitory receptors

| | |
|---|---|
| CTLA4 | AVSLSKMLKKRSPLTTGVYVKMPPTEPECEKQFQPYFI |
| | PIN (SEQ ID No 37) |
| LAG3 | HLWRRQWRPRRFSALEQGIHPPQAQSKIEELEQEPEPE |
| | PEPEPEPEPEPEPEQL (SEQ ID No 38) |
| HAVCR2 | FKWYSHSKEKIQNLSLISLANLPPSGLANAVAEGIRSE |
| (TIM3) | ENIYTIEENVYEVEEPNEYYCYVSSRQQPSQPLGCRFA |
| | MP (SEQ ID No 39) |
| LAIR1 | HRQNQIKQGPPRSKDEEQKPQQRPDLAVDVLERTADKA |
| | TVNGLPEKDRETDTSALAAGSSQEVTYAQLDHWALTQR |
| | TARAVSPQSTKPMAESITYAAVARH (SEQ ID |
| | No 40) |
| KIR2DL2 | HRWCSNKKNAAVMDQESAGNRTANSEDSDEQDPQEVTY |
| | TQLNHCVFTQRKITRPSQRPKTPPTDIIVYAELPNAES |
| | RSKVVSCP (SEQ ID No 41) |
| LILRB1 | LRHRRQGKHWTSTQRKADFQHPAGAVGPEPTDRGLQWR |
| | SSPAADAQEENLYAAVKHTQPEDGVEMDTRSPHDEDPQ |
| | AVTYAEVKHSRPRREMASPPSPLSGEFLDTKDRQAEED |
| | RQMDTEAAASEAPQDVTYAQLHSLTLRREATEPPPSQE |
| | GPSPAVPSIYATLAIH (SEQ ID No 2021) |
| TIGIT | LTRKKKALRIHSVEGDLRRKSAGQEEWSPSAPSPPGSC |
| | VQAEAAPAGLCGEQRGEDCAELHDYFNVLSYRSLGNCS |
| | FFTETG (SEQ ID No 2022) |
| CEACAM1 | HFGKTGRASDQRDLTEHKPSVSNHTQDHSNDPPNKMNE |
| | VTYSTLNFEAQQPTQPTSASPSLTATEIIYSEVKKQ |
| | (SEQ ID No 2023) |
| CSF1R | KYKQKPKYQVRWKIIESYEGNSYTFIDPTQLPYNEKWE |
| | FPRNNLQFGKTLGAGAFGKVVEATAFGLGKEDAVLKVA |
| | VKMLKSTAHADEKEALMSELKIMSHLGQHENIVNLLGA |
| | CTHGGPVLVITEYCCYGDLLNFLRRKAEAMLGPSLSPG |
| | QDPEGGVDYKNIHLEKKYVRRDSGFSSQGVDTYVEMRP |
| | VSTSSNDSFSEQDLDKEDGRPLELRDLLHFSSQVAQGMA |
| | FLASKNCIHRDVAARNVLLTNGHVAKIGDFGLARDIMND |
| | SNYIVKGNARLPVKWMAPESIFDCVYTVQSDVWSYGILL |
| | WEIFSLGLNPYPGILVNSKFYKLVKDGYQMAQPAFAPKN |
| | IYSIMQACWALEPTHRPTFQQICSFLQEQAQEDRRERDY |
| | TNLPSSSRSGGSGSSSSELEEESSSEHLTCCEQGDIAQP |
| | LLQPNNYQFC ((SEQ ID No 2024) |
| CD5 | KKLVKKFRQKKQRQWIGPTGMNQNMSFHRNHTATVRSHAEN |
| | PTASHVDNEYSQPPRNSHLSAYPALEGALHRSSMQPDNSSD |
| | SDYDLHGAQRL ((SEQ ID No 2025) |
| CD96 | RKWCQYQKEIMERPPPFKPPPPPIKYTCIQEPNESDLPYHE |
| | METL (SEQ ID No 2026) |
| CD22 | KLQRRWKRTQSQQGLQENSSGQSFFVRNKKVRRAPLSEGPH |
| | SLGCYNPMMEDGISYTTLRFPEMNIPRTGDAESSEMQRPPP |
| | DCDDTVTYSALHKRQVGDYENVIPDFPEDEGIHYSELIQFG |
| | VGERPQAQENVDYVILKH (SEQ ID No 2027) |

TABLE 3
Examples of naturally occurring N-terminal flanking regions
of ITIM only intracellular domains varying in length from
0 to 4211 (Table 3 comprises SEQ ID No 42 to SEQ ID No 351)

| | |
|---|---|
| K | |
| V | |
| Q | |
| V | |
| T | |
| F | |
| Y | |
| LL | |
| QP | |
| EH | |
| NL | |
| KW | |
| LV | |
| NP | |
| TF | |
| RL | |
| LNP | |
| KCP | |
| ETL | |
| RRA | |
| MAQ | |
| RRRP | SEQ ID No 42 |
| MSEE | SEQ ID No 43 |
| MTSE | SEQ ID No 44 |
| DRYL | SEQ ID No 45 |
| MTDS | SEQ ID No 46 |
| AAKP | SEQ ID No 47 |
| QHFS | SEQ ID No 48 |
| MKPK | SEQ ID No 49 |
| IAAL | SEQ ID No 50 |
| CLNP | SEQ ID No 51 |
| QKVL | SEQ ID No 52 |
| DRYQS | SEQ ID No 53 |
| LKAKD | SEQ ID No 54 |
| DRYYA | SEQ ID No 55 |
| MSYYG | SEQ ID No 56 |
| SSSKP | SEQ ID No 57 |
| LKIRH | SEQ ID No 58 |
| DVRHV | SEQ ID No 59 |
| DRFYA | SEQ ID No 60 |
| EGWRI | SEQ ID No 61 |
| SDIKR | SEQ ID No 62 |
| LHHKKY | SEQ ID No 63 |
| TVDRYL | SEQ ID No 64 |
| SSPTFR | SEQ ID No 65 |
| WRRAGH | SEQ ID No 66 |
| YRVDLV | SEQ ID No 67 |
| NSFDLA | SEQ ID No 68 |
| YRSGIT | SEQ ID No 69 |
| YRLGLT | SEQ ID No 70 |
| QHIMAI | SEQ ID No 71 |
| NSCANP | SEQ ID No 72 |
| RRFCAT | SEQ ID No 73 |
| GDMANNS | SEQ ID No 74 |
| MAYQSLR | SEQ ID No 75 |
| TARNLTV | SEQ ID No 76 |
| MERAEEP | SEQ ID No 77 |
| SMDRFLA | SEQ ID No 78 |
| LRLAAAP | SEQ ID No 79 |
| LRLFAAP | SEQ ID No 80 |
| KRLIALS | SEQ ID No 81 |
| YSNSSVNP | SEQ ID No 82 |
| YANSCVNP | SEQ ID No 83 |
| KLSPRVKR | SEQ ID No 84 |
| KIRLRCQS | SEQ ID No 85 |
| SCDLLTAF | SEQ ID No 86 |
| MASESSPL | SEQ ID No 87 |
| KTANEGGS | SEQ ID No 88 |
| DFAKEGHS | SEQ ID No 89 |
| DHVRRKDS | SEQ ID No 90 |
| DNVKKENS | SEQ ID No 91 |
| VMWKHRYQ | SEQ ID No 92 |
| KMYYSRRG | SEQ ID No 93 |
| DRYIAIRIP | SEQ ID No 94 |
| DRYLAICVP | SEQ ID No 95 |
| DRYLRVKLT | SEQ ID No 96 |
| DRYIGVSYP | SEQ ID No 97 |
| DRYIGVRYS | SEQ ID No 98 |
| DRYVGVRHS | SEQ ID No 99 |
| DRYLAVTNP | SEQ ID No 100 |
| MPFHPVTAA | SEQ ID No 101 |
| DRYISIHRP | SEQ ID No 102 |
| MQLKILVSA | SEQ ID No 103 |
| WKQRRAKEK | SEQ ID No 104 |
| DRFIAVVHP | SEQ ID No 105 |
| DRYIAITKP | SEQ ID No 106 |
| NRYCYICHS | SEQ ID No 107 |
| DRYLAITKP | SEQ ID No 108 |
| DRYCAVMDP | SEQ ID No 109 |
| DRYISIFYA | SEQ ID No 110 |
| DRYITIFHA | SEQ ID No 111 |
| NRYCYICHS | SEQ ID No 112 |
| WKKICNKSS | SEQ ID No 113 |
| WCYRKRYFV | SEQ ID No 114 |
| AHSNSCLNP | SEQ ID No 115 |
| PVFYKLGIT | SEQ ID No 116 |
| KFHRSRRLLG | SEQ ID No 117 |
| VDRYLRVKIP | SEQ ID No 118 |
| FERSCRKENM | SEQ ID No 119 |
| LPSIYLVFLI | SEQ ID No 120 |
| SSKTFQTWQS | SEQ ID No 121 |
| IDRYIAVCHP | SEQ ID No 122 |
| SFCLRNLFFP | SEQ ID No 123 |
| LLKTAKEGGS | SEQ ID No 124 |
| MWRNSKVMNI | SEQ ID No 125 |
| VEKKLFIHEYI | SEQ ID No 126 |
| RKRNNSRLGNG | SEQ ID No 127 |
| QRITVHVTRRP | SEQ ID No 128 |
| MEAAHAKTTEEC | SEQ ID No 129 |
| MARISFSYLCPA | SEQ ID No 130 |
| CCKRQKGKPKRK | SEQ ID No 131 |
| MTGDKGPQRLSG | SEQ ID No 132 |
| PDIPQSVKNKVLE | SEQ ID No 133 |
| KIFKIDIVLWYRD | SEQ ID No 134 |
| TEYVVRLWSAGCR | SEQ ID No 135 |
| QSKSELSHYTFYF | SEQ ID No 136 |
| SIVAYKQVPL | SEQ ID No 137 |
| SLDFFGSQNTQDD | SEQ ID No 138 |
| LWLHNGRSCFGVNR | SEQ ID No 139 |
| RFLRLNLKPDLSDT | SEQ ID No 140 |
| REHQRSGSYHVREE | SEQ ID No 141 |
| MITLTELKCLADAQ | SEQ ID No 142 |
| YNLTRLCRWDKRLL | SEQ ID No 143 |
| AFMNENFKKNVLSA | SEQ ID No 144 |
| MIYRLAQAEERQQLE | SEQ ID No 145 |
| KFRKNFWKLVKDIGC | SEQ ID No 146 |
| ALALAALAAVEPACG | SEQ ID No 147 |
| KKIAAATETAAQENA | SEQ ID No 148 |
| YRKVSKAEEAAQENA | SEQ ID No 149 |
| LKDFSILLMEGVPKS | SEQ ID No 150 |
| TVATAVEQYVPSEKL | SEQ ID No 151 |
| MGRQKELVSRCGEMLH | SEQ ID No 152 |
| CKRRRGQSPQSSPDLP | SEQ ID No 153 |
| LLEGVHLFLTARNLTV | SEQ ID No 154 |
| EERERKHHLKHGPNAP | SEQ ID No 155 |
| PLTHRLLCSEEPPRLH | SEQ ID No 156 |
| LYLLVRKHINRAHTAL | SEQ ID No 157 |
| KLPLWGQPSDQNCYDD | SEQ ID No 158 |
| MYRLKVLQMRLRSAITG | SEQ ID No 159 |
| SMRGTICNPGPRKSMSK | SEQ ID No 160 |
| RILVRKLEPAQGSLHTQ | SEQ ID No 161 |
| SRYATLMQKDSSQETT | SEQ ID No 162 |
| SSHFGCQLVCCQSSNVS | SEQ ID No 163 |
| RILMRKLRTQETRGNEV | SEQ ID No 164 |
| RILLQKLRPPDIRKSDS | SEQ ID No 165 |
| RILLQKLTSPDVGGNDQ | SEQ ID No 166 |
| RSVRPCFTQAAFLKSKYW | SEQ ID No 167 |
| RSGRGRKLSGDQITLPTT | SEQ ID No 168 |
| MAAENEASQESALGAYSP | SEQ ID No 169 |
| TAHVFSCLSLRLRAAFFY | SEQ ID No 170 |
| NPFIYSRNSAGLRRKVLWC | SEQ ID No 171 |
| NNESSNNPSSIASFLSSITY | SEQ ID No 172 |
| TPQLFINYKLKSVAHLPWRM | SEQ ID No 173 |
| WRLKPSADCGPFRGLPLFIH | SEQ ID No 174 |
| NIPLLFYHLWRYFHRPADGSE | SEQ ID No 175 |
| SQVTKSSPEQSYQGDMYPTRG | SEQ ID No 176 |
| CCSALQKRCRKCFNKDSTEAT | SEQ ID No 177 |
| CQRLAARLGVVTGKDLGEVCH | SEQ ID No 178 |
| QVFRNISGKQSSLPAMSKVRR | SEQ ID No 179 |
| GGRREGESWNWAWVLSTRLARH | SEQ ID No 180 |
| YKMYGSEMLHKRDPLDEDEDTD | SEQ ID No 181 |
| HMYRERGGELLVHTGFLGSSQDR | SEQ ID No 182 |
| RKWCQYQKEIMERPPPFKPPPPP | SEQ ID No 183 |
| HNKRKIFLLVQSRKWRDGLCSKT | SEQ ID No 184 |
| RAARRRPEHLDTPDTPPRSQAQE | SEQ ID No 185 |
| NGTCFTAGRLIYVAGREGHMLKV | SEQ ID No 186 |
| DANYEMPGETLKVRYWPRDSWPVG | SEQ ID No 187 |
| ARSQMARNIWYFVVS | SEQ ID No 188 |
| LRKRRDSLSLSTQRTQGPAESARN | SEQ ID No 189 |
| DAASEIPEQGPVIKFWPNEKWAFIG | SEQ ID No 190 |
| WGYKNYREQRQLPQGDYVKKPGDGD | SEQ ID No 191 |
| TSYYSFVSHLRKIRTCTSIMEKD | SEQ ID No 192 |
| LIVRALIYKDLDNSPLRRK | SEQ ID No 193 |
| DHWALTQRTARAVSPQSTKPMAES | SEQ ID No 194 |
| HHNKRKIIAFVLEGKRSKVTRRPKA | SEQ ID No 195 |
| EWKSPFGLTPKGRNRSKVFSFSSALN | SEQ ID No 196 |
| YFLGRLVPRGRGAAEAATRKQRITETE | SEQ ID No 197 |
| QATACRTCHRQQQPAACRGFARVARTIL | SEQ ID No 198 |
| NKFSKYYQKQKDIDVDQCSEDAPEKCHE | SEQ ID No 199 |
| SKCSREVLWHCHLCPSSTEHASASANGH | SEQ ID No 200 |
| DMGSSDGETTHDSQITQEAVPKSLGASE | SEQ ID No 201 |
| CSRAARGTIGARRTGQPLKEDPSAVPVFS | SEQ ID No 202 |
| SVQKLSEFLSSAEIREEQCAPHEPTPQGPA | SEQ ID No 203 |
| KCYKIEIMLFYRNHFGAEELDGDNKDYDAY | SEQ ID No 204 |
| KCYNIELMLFYRQHFGADETNDDNKEYDAY | SEQ ID No 205 |
| GWKLRSYKTLFDAAETMVSLQLGIFNYEEV | SEQ ID No 206 |
| SSFSSCKDVTAEENNEAKNLQLAVARIKKG | SEQ ID No 207 |
| MRTKAAGCAERRPLQPRTEAAAAPAGRAMP | SEQ ID No 208 |
| RKRWQNEKLGLDAGDEYEDENLYEGLNLDDC | SEQ ID No 209 |
| MASHEVDNAELGSASAHGTPGSEAGPEELNT | SEQ ID No 210 |
| NGHPTSNAALFFIERRPHHWPAMKFRSHPDH | SEQ ID No 211 |
| ALLNNIIEIRLDAKKFVTELRRPVAVRAKDIG | SEQ ID No 212 |
| PETKGQSLAEIDQQFQKRRFTLSFGHRQNSTG | SEQ ID No 213 |
| PETKGKKLEEIESLFDNRLCTCGTSDSDEGRY | SEQ ID No 214 |
| YNLMSQKFRAAFRKLCNCKQKPTEKPANYSVA | SEQ ID No 215 |
| NYIFFGRGPQRQKKAAEKAASANNEKMRLDVNK | SEQ ID No 216 |
| DLNESANSTAQYASNAWFAAASSEPEEGISVFE | SEQ ID No 217 |
| DLNESANSTAQYASNAWFAAASSEPEEGISVFE | SEQ ID No 218 |
| SYQQKKFCFSIQQGLNADYVKGENLEAVVCEEPQ | SEQ ID No 219 |
| MDGSGERSLPEPGSQSSAASDDIEIVVNVGGVRQ | SEQ ID No 220 |
| RWCSKKKDAAVMNQEPAGHRTVNREDSDEQDPQE | SEQ ID No 221 |
| MFCSEKKLREVERIVKANDREYNEKFQYADNRIHT | SEQ ID No 222 |
| TQFSETKQRESQLMREQRVRFLSNASTLASFSEPG | SEQ ID No 223 |
| NWLNPPRLQMGSMTSTTLYNSMWFVYGSFVQQGGE | SEQ ID No 224 |
| CFYIKKINPLKEKSIILPKSLISVVRSATLETKPE | SEQ ID No 225 |
| HRWCANKKNAVVMDQEPAGNRTVNREDSDEQDPQE | SEQ ID No 226 |
| NYYSSCRKPTTTKKTTSLLHPDSSRWIPERISLQAP | SEQ ID No 227 |
| HLTALFLTVYEWRSPYGLTPRGRNRSTVFSYSSALN | SEQ ID No 228 |
| YFFIRTLQAHHDRSERESPFSGSSRQPDSLSSIENA | SEQ ID No 229 |
| LHCCCSNKKNAAVMDQEPAGDRTVNREDSDDQDPQE | SEQ ID No 230 |
| HYLRFQRKSIDGSFGSNDGSGNMVASHPIAASTPEG | SEQ ID No 231 |
| RWWNQYENLPWPDRLMSLVSGFVEGKDEQGRLLRRTL | SEQ ID No 232 |
| DVDVDDTTEEQGYGMAYTVHKWSELSWASHWVTFGCW | SEQ ID No 233 |
| RYCWLRRQAALQRRLSAMEKGKLHKPGKDASKRGRQTP | SEQ ID No 234 |
| MKKAEMGRFSISPDEDSSSYSSNSDFNYSYPTKQAALK | SEQ ID No 235 |
| LKCLIVALPKIILAVKSKGKFYLVIEELSQLFRSLVPIQ | SEQ ID No 236 |
| ETLLNAPRAMGTSSSPPSPASVVAPGTTLFEESRLPVFT | SEQ ID No 237 |
| YVRSWRKAGPLPSQIPPTAPGGEQCPLYANVHHQKGKDEG | SEQ ID No 238 |
| TYLSEPLVRGYTTAAAVQVFVSQLKYVFGLHLSSHSGPLS | SEQ ID No 239 |
| RWWSQYTSIPLPDQLMCVISASVHGVDQRGRLLRRTL | SEQ ID No 240 |
| RRFRQACLETCARCCPRPPRARPRALPDEDPPTPSIASLSR | SEQ ID No 241 |
| MAEAITYADLRFVKAPLKKSISSRLGQDPGADDDGE | SEQ ID No 242 |
| MQTSEREGSGPELSPSVMPEAPLESPPFPTKSPAFDLFNLV | SEQ ID No 243 |
| SKEKQFRGLQSRIEQEQKFTVIRGGQVIQIPVADITVGDIAQ | SEQ ID No 244 |
| SKEKQFRGLQSRIEQEQKFTVVRAGQVVQIPVAEIVVGDIAQ | SEQ ID No 245 |
| SKEKQFRGLQCRIEQEQKFSIIRNGQLIQLPVAEIVVGDIAQ | SEQ ID No 246 |
| KCLQGNADGDGGGGQCCRRQDSPSPDFYKQSSPNLQVSSDGT | SEQ ID No 247 |
| SSECQRYVYSILCCKESSDPSSYNSSGQLMASKMDTCSSNLNN | SEQ ID No 248 |
| MDNQGVIYSDLNLPPNPKRQQRKPKGNKNSILATEQE | SEQ ID No 249 |
| WWGDIWWKTMMELRSLDTQKATCHLQQVTDLPWTSVSSPVERE | SEQ ID No 250 |
| RLLFSKTYKLQERSDLTVKEKEELIEEWQPEPLVPPVPKDHPA | SEQ ID No 251 |
| KYYPINMDFKPNFITTYKCECVAPDTVNTTVFNASAPLAPDTNA | SEQ ID No 252 |
| CIRRSCLHRRRTFTYQSGSGEETILQFSSGTLTLTRRPKLQPEP | SEQ ID No 253 |
| MTNPSDRVLPANSMAESREGDFGCTVMELRKLMELRSRDALTQIN | SEQ ID No 254 |
| WLHRRLPPQPIRPLPRFAPLVKTEPQRPVKEEEPKIPGDLDQEPS | SEQ ID No 255 |
| WCQCCPHTCCCYVRCPCCPDKCCCPEALYAAGKAATSGVPSIYAP | SEQ ID No 256 |
| AVCQCRRKNYGQLDIFPARDTYHPMSEYPTYHTHGRYVPPSSTDR | SEQ ID No 257 |
| TVVLRVQFPSWNGLGSIPSTDIYKSTKNYKNIEEPQGVKILRFSSP | SEQ ID No 258 |
| DNTVPGSPEERGLIQWKAGAHANSDMSSSLKSYDFPIGMGIVKRITF | SEQ ID No 259 |
| YRCSQHSSSSEESTKRTSHSKLPEQEAAEADLSNMERVSLSTADPQG | SEQ ID No 260 |
| GLKGIRSALKRPVEQPLGEIPEKSLHSIAVSSIQKAKGYQLLEEEKIV | SEQ ID No 261 |
| RWRRRKGQQRTKATTPAREPFQNTEEPYENIRNEGQNTDPKLNPKDDG | SEQ ID No 262 |
| RFTGHPGAYLRLINRWRLEECHPSGCLIDLCMQMGIIMVLKQTWNNFME | SEQ ID No 263 |
| VVALIYCRKKRISALPGYPECREMGETLPEKPANPTNPDEADKVGAENT | SEQ ID No 264 |
| SYRYVTKPPAPPNSLNVQRVLTFQPLRFIQEHVLIPVFDLSGPSSLAQP | SEQ ID No 265 |
| SNKCDVVVVGGGISGMAAAKLLHDSGLNVVVLEARDRVGGRTYTLRNQK | SEQ ID No 266 |
| TLRNATQQKDMVEVADFDFSPMSDKNPEPPSGVRCCCQMCCGPFLLE | SEQ ID No 267 |
| TP | |
| HRQNQIKQGPPRSKDEEQKPQQRPDLAVDVLERTADKATVNGLPEKDR | SEQ ID No 268 |
| ETDTSALAAGSSQE | |
| MDEEEDGAGAEESGQPRSFMRLNDLSGAGGRPGPGSAEKDPGSADSE | SEQ ID No 269 |
| AEG | |
| EMLHLGFGTIRDSLNSKRRELEDPGAYNYPFTWNTPSAPPGYNIAVKPDQ | SEQ ID No 270 |
| AKTGRTSIQRDLKEQQPQALAPGRGPSHSSAFSMSPLSTAQAPLPNPRT | SEQ ID No 271 |
| AA | |
| LCLRKQSNGREAEYSDKHGQYLIGHGTKVYIDPFTYEDPNEAVREFAKEID | SEQ ID No 272 |
| KNFRRDFFILLSKCGCYEMQAQIYRTETSSTVHNTHPRNGHCSSAPRVT | SEQ ID No 273 |
| NG | |
| QDIGYFLKVAAVGRRVRSYGKRRPARTILRAFLEKARQTPHKPFLLFRDET | SEQ ID No 274 |
| MSAARPQFSIDDAFELSLEDGGPGPESSGVARFGPLHFERRARFEVAD | SEQ ID No 275 |
| EDKQSR | |
| YAATSRQLKRLESVSRSPIYSHFSETVTGASVIRAYNRSRDFEIISDTKVD | SEQ ID No 276 |
| ANQR | |
| MTVPKEMPEKWARAQAPPSWSRKKPSWGTEEERRARANDREYNEKF | SEQ ID No 277 |
| QYASNCIKT | |
| KTHRRKAARTAVGRNDTHPTTGSASPKHQKKSKLHGPTETSSCSGAAP | SEQ ID No 278 |
| TVEMDEE | |
| KARRKQAAGRPEKMDDEDPIMGTITSGSRKKPWPDSPGDQASPPGDA | SEQ ID No 279 |
| PPLEEQKE | |
| RVKTRRKKAAQPVQNTDDVNPVMVSGSRGHQHQFQTGIVSDHPAEAG | SEQ ID No 280 |
| PISEDEQE | |
| MKFEEKCGDNGSIVGRNQSYPGEKHQPKGKPIANGEAEVYAKQEANGK | SEQ ID No 281 |
| CSTPRKSL | |
| DIKINQYIIKKCSPCCACLAKAMERSEQQPLMGWEDEGQPFIRRQSRTD | SEQ ID No 282 |
| SGIFYED | |
| MAEPQAESEPLLGGARGGGGDWPAGLTTYRSIQVGPGAAARWDLCID | SEQ ID No 283 |
| QAVVFIEDA | |
| AVTISLAYSVKKMMKDNNLVRHLDACETMGNATAICSDKTGTLTTNRMT | SEQ ID No 284 |
| VVQAYVGD | |
| AVTISLAYSVKKMMKDNNLVRHLDACETMGNATAICSDKTGTLTMNRMT | SEQ ID No 285 |
| VVQAYIGG | |
| SNMKSRSAGKLWELQHEIEVYRKTVIAQWRALDLDVVLTPMLAPALDLN | SEQ ID No 286 |
| APGRATGA | |
| HPELNVQKRKRSFKAVVTAATMSSRLSHKPSDRPNGEAKTELCENVDP | SEQ ID No 287 |
| NSPAAKKKY | |
| RKSNFIFDKLHKVGIKTRRQWRRSQFCDINILAMFCNENRDHIKSLNRLD | SEQ ID No 288 |
| FITNESD | |
| KICRKEARKRAAAEQDVPSTLGPISQGHQHECSAGSSQDHPPPGAATY | SEQ ID No 289 |
| TPGKGEEQE | |
| SGKTLESWRSLCTRCCWASKGAAVGGGAGATAAGGGGGPGGGGGG | SEQ ID No 290 |
| GPGGGGGPGGGGG | |
| RSCRKKSARPAADVGDIGMKDANTIRGSASQGNLTESWADDNPRHHGL | SEQ ID No 291 |
| AAHSSGEERE | |
| MKSKMRQALGFAKEARESPDTQALLTCAEKEEENQENLDWVPLTTLSH | SEQ ID No 292 |
| CKSLRTMTAI | |
| AILFAVVARGTTILAKHAWCGGNFLEVTEQILAKIPSENNKLTYSHGNYLF | SEQ ID No 293 |
| HYICQDR | |
| MDHAEENEILAATQRYYVERPIFSHPVLQERLHTKDKVPDSIADKLKQAF | SEQ ID No 294 |
| TCTPKKIRN | |
| KKLVKKFRQKKQRQWIGPTGMNQNMSFHRNHTATVRSHAENPTASHV | SEQ ID No 295 |
| DNEYSQPPRNSHL | |
| MPRRLQPRGAGTKGPPAPAPAASGAARNSHSAASRDPPASAKPLLRW | SEQ ID No 296 |
| DEVPDDFVECFIL | |
| RSCRKKSARPAVGVGDTGMEDANAVRGSASQGPLIESPADDSPPHHAP | SEQ ID No 297 |
| PALATPSPEEGE | |
| DNFEYLTRDSSILGPHHLDEFIRVWAEYDPAACGRISYNDMFEMLKHMS | SEQ ID No 298 |
| PPLGLGKKCPAR | |
| SKRWTHLPCGCIINCRQNAYAVASDGKKIKRKGFEFNLSFQKSYGIYKIA | SEQ ID No 299 |
| HEDYYDDDENS | |
| NFNYFYHRETEGEEQSQYMHVGSCQHLSSSAEELRKARSNSTLSK | SEQ ID No 300 |
| VRSCRKKSARPAAGVGDTGIEDANAVRGSASQGPLTEPWAEDSPPDQP | SEQ ID No 301 |
| PPASARSSVGEGE | |
| LKLANEETIKNITHWTLFNYYNSSGWNESVPRPPLHPADVPRGSCWETA | SEQ ID No 302 |
| VGIEFMRLTVSDML | |
| MCHSRSCHPTMTILQAPTPAPSTIPGPRRGSGPEIFTFDPLPEPAAAPAG | SEQ ID No 303 |
| RPSASRGHRKRSRR | |
| ASSAASSEHFEKLHEIFRGLHEDLQGVPERLLGTAGTEEKKKLIRDFDEK | SEQ ID No 304 |
| QQEANETLAEMEEE | |
| MADQIPLYPVRSAAAAAANRKRAAYYSAAGPRPGADRHSRYQLEDESA | SEQ ID No 305 |
| HLDEMPLMMSEEGFENEE | |
| SMILSASVIRVRDGLPLSASTDYEQSTGMQECRKYFKMLSRKLAQLPDR | SEQ ID No 306 |
| CTLKTGHYNINFISSLG | |
| LTRKKKALRIHSVEGDLRRKSAGQEEWSPSAPSPPGSCVQAEAAPAGL | SEQ ID No 307 |
| CGEQRGEDCAELHDYFNV | |
| TIPTSRLKFLKEAGRLTQKEEIPEEELNEDVEEIDHAERELRRGQILWFRG | SEQ ID No 308 |
| LNRIQTQIRVVKAFRS | |
| TIPTSQLKCLKEAGHGPGKDEMTDEELAEGEEEIDHAERELRRGQILWF | SEQ ID No 309 |
| RGLNRIQTQIRVVKAFRS | |
| KCYFLRKAKAKQMPVEMSRPAVPLLNSNNEKMSDPNMEANSHYGHND | SEQ ID No 310 |
| DVRNHAMKPINDNKEPLNSD | |
| MGDTHWRVAQERDELWRAQVVATTVMLERKLPRCLWPRSGICGCEFG | SEQ ID No 311 |
| LGDRWFLRVENHNDQNPLRV | |
| YSPGDYICKKGDIGREMYIIKEGKLAVVADDGVTQFVVLSDGSYFGEISIL | SEQ ID No 312 |
| NIKGSKAGNRRTANIKS | |
| FSPGDYICRKGDIGKEMYIIKEGKLAVVADDGVTQYALLSAGSCFGEISIL | SEQ ID No 313 |
| NIKGSKMGNRRTANIRS | |
| CLKIIKEYERAVVFRLGRIQADKAKGPGLILVLPCIDVFVKVDLRTVTCNIP | SEQ ID No 314 |
| PQEILTRDSVTTQVDG | |
| MTEGARAADEVRVPLGAPPPGPAALVGASPESPGAPGREAERGSELGV | SEQ ID No 315 |
| SPSESPAAERGAELGADEEQR | |
| VRLRLQKHRPPADPCRGETETMNNLANCQREKDISVSIIGATQIKNTNKK | SEQ ID No 316 |
| ADFHGDHSADKNGFKARYPA | |
| VITTCLALGTRRMAKKNAIVRSLPSVETLGCTSVICSDKTGTLTTNQMSV | SEQ ID No 317 |
| CRMFILDRVEGDTCSLNEFTITG | |
| MEAVLNELVSVEDLLKFEKKFQSEKAAGSVSKSTQFEYAWCLVRSKYND | SEQ ID No 318 |
| DIRKGIVLLEELLPKGSKEEQRDY | |
| TRPKPLKPPCDLSMQSVEVAGSGGARRSALLDSDEPLVYFYDDVTTLYE | SEQ ID No 319 |
| GFQRGIQVSNNGPCLGSRKPDQPYEW | |
| HRPKALQPPCNLLMQSEEVEDSGGARRSVIGSGPQLLTHYYDDARTMY | SEQ ID No 320 |
| QVFRRGLSISGNGPCLGFRKPKQPYQW | |
| RRHQGKQNELSDTAGREINLVDAHLKSEQTEASTRQNSQVLLSETGIYD | SEQ ID No 321 |
| NDPDLCFRMQEGSEVYSNPCLEENKPG | |
| WSCERYRADVRTVWEQCVAIMSEEDGDDDGGCDDYAEGRVCKVRFD | SEQ ID No 322 |
| ANGATGPGSRDPAQVKLLPGRHMLFPPLER | |
| GPLVRYLDVKKTNKKESINEELHIRLMDHLKAGIEDVCGHWSHYQVRDK | SEQ ID No 323 |
| FKKFDHRYLRKILIRKNLPKSSIV | |
| KYPTLLHQRKKQRFLSKHISHRGGAGENLENTMAAFQHAVKIGTDMLEL | SEQ ID No 324 |
| DCHITKDEQVVVSHDENLKRATGVNVNISD | |
| AHDHYTVDVVVAYYITTRLFWWYHTMANQQVLKEASQMNLLARVWWY | SEQ ID No 325 |
| RPFQYFEKNVQGIVPRSYHWPFPWPVVHLSRQ | |
| SKASRAPRAHRDINVPRALVDILRHQAGPGTRPDRARSSSLTPGIGGPD | SEQ ID No 326 |
| SMPPRTPKNLYNTVKTPNLDWRALPPPSPS | |
| FKVYKWKQSRDLYRAPVSSLYRTPGPSLHADAVRGGLMSPHLYHQVYL | SEQ ID No 327 |
| TTDSRRSDPLLKKPGAASPLASRQNTLRSCDP | |
| MLCRKTSQQEHVYEAARAHAREANDSGETMRVAIFASGCSSDEPTSQN | SEQ ID No 328 |
| LGNNYSDEPCIGQEYQIIAQINGNYARLLDTVP | |
| KQKNEHHHGHSHYASESLPSKKDQEEGVMEKLQNGDLDHMIPQHCSS | SEQ ID No 329 |
| ELDGKAPMVDEKVIVGSLSVQDLQASQSACYWLKG | |
| HKALMERALRATFREALSSLHSRRRLDTEKKHQEHLLLSILPAYLAREMK | SEQ ID No 330 |
| AEIMARLQAGQGSRPESTNNFHSLYVKRHQGVS | |
| HKHQMQDASRDLFTYTVKCIQIRRKLRIEKRQQENLLLSVLPAHISMGMK | SEQ ID No 331 |
| LAIIERLKEHGDRRCMPDNNFHSLYVKRHQNVS | |
| ERFVAKPCAIALNIQANGPQIAPPNAILEKVFTAITKHPDEKRLEGLSKQLD | SEQ ID No 332 |
| WDVRSIQRWFRQRRNQEKPSTLTRFCESMWRF | |
| AWRLWRCRVARSRELNKPWAAQDGPKPGLGLQPRYGSRSAPKPQVA | SEQ ID No 333 |
| VPSCPSTPDYENMFVGQPAAEHQWDEQGAHPSEDNDFY | |
| HLSQWTRGRSRSHPGQGRSGESVEEVPLYGNLHYLQTGRLSQDPEPD | SEQ ID No 334 |
| QQDPTLGGPARAAEEVMCYTSLQLRPPQGRIPGPGTP | |
| KKRHCGYSKAFQDSDEEKMHYQNGQAPPPVFLPLHHPPGKLPEPQFYA | SEQ ID No 335 |
| EPHTYEEPGRAGRSFTREIEASRIHIEKIIGSGDSGE | |
| QSVFNKRKSRVRHYLVKCPQNSSGETVTSVTSLAPLQPKKGKRQKEKP | SEQ ID No 336 |
| DIPPAVPAKAPIAPTFHKPKLLKPQRKVTLPKIAEEN | |
| MASPGAGRAPPELPERNCGYREVEYWDQRYQGAADSAPYDWFGDFS | SEQ ID No 337 |
| SFRALLEPELRPEDRILVLGCGNSALSYELFLGGFPNVTS | |
| MPHFTVVPVDGPRRGDYDNLEGLSWVDYGERAELDDSDGHGNHRESS | SEQ ID No 338 |
| PFLSPLEASRGIDYYDRNLALFEEELDIRPKVSSLLGKL | |
| AIPTRSLKFLKEAGHGTTKEEITKDAEGLDEIDHAEMELRRGQILWFRGL | SEQ ID No 339 |
| NRIQTQIDVINTFQTGASFKGVLRRQNMGQHLDVKLVPS | |
| IFMKTAQAHRRAETLIFSKHAVIALRHGRLCFMLRVGDLRKSMIISATIHM | SEQ ID No 340 |
| QVVRKTTSPEGEVVPLHQVDIPMENGVGGNSIFLVAPL | |
| SWKRYPASMKQLQQRSLMRRHRKKKRQSLKQMTPSTQEFYVDYKPTN | SEQ ID No 341 |
| TETSEMLLNGTGPCTYNKSGSRECEIPLSMNVSTFLAYDQPT | |
| MANVSKKVSWSGRDRDDEEAAPLLRRTARPGGGTPLLNGAGPGAARQ | SEQ ID No 342 |
| SPRSALFRVGHMSSVELDDELLDPDMDPPHPFPKEIPHNEKLLS | |
| RLFKRRQGRIFPEGSCLNTFTKNPYAASKKTIYTYIMASRNTQPAESRIYD | SEQ ID No 343 |
| EILQSKVLPSKEEPVNTVYSEVQFADKMGKASTQDSKPPGT | |
| AMCLWKNRQQNTIQKYDPPGYLYQGSDMNGQMVDYTTLSGASQINGN | SEQ ID No 344 |
| VHGGFLTNGGLS | |
| LGSGFALKVQEQHRQKHFEKRRMPAANLIQAAWRLYSTDMSRAYLTAT | SEQ ID No 345 |
| WYYYDSILPSFRELALLFEHVQRARNGGLRPLEVRRAPVPDGAP | |
| MSSHKGSVVAQGNGAPASNREADTVELAELGPLLEEKGKRVIANPPKAE | SEQ ID No 346 |
| EEQTCPVPQEEEEEVRVLTLPLQAHHAMEKMEEFVYKVWEGRWRV | |
| WRMMKYQQKAAGMSPEQVLQPLEGDLCYADLTLQLAGTSPQKATTKLS | SEQ ID No 347 |
| SAQVDQVEVEYVTMASLPKED | |
| HYARARRKPGGLSATGTSSHSPSECQEPSSSRPSRIDPQEPTHSKPLAP | SEQ ID No 348 |
| MELEPMYSNVNPGDSNPIYSQIWSIQHTKENSANCPMMHQEHEELT | |
| MAKRKQGNRLGVCGRFLSSRVSGMNPSSVVHHVSDSGPAAELPLDVP | SEQ ID No 349 |
| HIRLDSPPSFDNTTYTSLPLDSPSGKPSLPAPSSLPPLPPKVLVCSKP | |
| SPNRKNPLWPSVPDPAHSSLGSWVPTIMEEDAFQLPGLGTPPITKLTVL | SEQ ID No 350 |
| EEDEKKPVPWESHNSSETCGLPTLVQTYVLQGDPRAVSTQPQSQSGTS | |
| DQ | |
| KRVQETKFGNAFTEEDSELVVNYIAKKSFCRRAIELTLHSLGVSEELQNK | SEQ ID No 351 |
| LEDVVIDRNLLILGKILGEGEFGSVMEGNLKQEDGTSLKVAVKTMKLDNS | |
| SQREIEEFLSEAACMKDFSHPNVIRLLGVCIEMSSQGIPKPMVILPFMKY | |
| GDLHTY | |

TABLE 4
Examples of naturally occurring C-terminal flanking regions
of ITIM only intracellular domains (Table 4 comprises
SEQ ID No 352 to SEQ ID No 685)

| | |
|---|---|
| K | |
| I | |
| N | |
| R | |
| E | |
| S | |
| R | |
| G | |
| Q | |
| I | |
| A | |
| YA | |
| VQ | |
| QE | |
| MT | |
| SK | |
| AR | |
| AK | |
| RR | |
| QI | |
| QI | |
| LT | |
| VI | |
| VLT | |
| KVS | |
| ARS | |
| IFR | |
| TFL | |
| QGVQ | SEQ ID No 352 |
| FSVR | SEQ ID No 353 |
| YSSK | SEQ ID No 354 |
| PKTR | SEQ ID No 355 |
| VNDT | SEQ ID No 356 |
| GMQQ | SEQ ID No 357 |
| PDLL | SEQ ID No 358 |
| HKSL | SEQ ID No 359 |
| RQPLN | SEQ ID No 360 |
| RTPTN | SEQ ID No 361 |
| RNLTN | SEQ ID No 362 |
| TVFSP | SEQ ID No 363 |
| NRFMK | SEQ ID No 364 |
| LNAIA | SEQ ID No 365 |
| LFTML | SEQ ID No 366 |
| MYVMG | SEQ ID No 367 |
| VTGTR | SEQ ID No 368 |
| TTHRR | SEQ ID No 369 |
| VTRRK | SEQ ID No 370 |
| VTPVR | SEQ ID No 371 |
| MTVRK | SEQ ID No 372 |
| MTVKR | SEQ ID No 373 |
| VTPRR | SEQ ID No 374 |
| KPWWD | SEQ ID No 375 |
| NRLMK | SEQ ID No 376 |
| FKETV | SEQ ID No 377 |
| PFLKNT | SEQ ID No 378 |
| VTQRRG | SEQ ID No 379 |
| MTERKA | SEQ ID No 380 |
| VTMRRT | SEQ ID No 381 |
| RQALAE | SEQ ID No 382 |
| APDSNT | SEQ ID No 383 |
| SKKRGG | SEQ ID No 384 |
| EISAAS | SEQ ID No 385 |
| STLGPG | SEQ ID No 386 |
| NSLSFL | SEQ ID No 387 |
| AHLVQY | SEQ ID No 388 |
| DEHDAII | SEQ ID No 389 |
| VTKRCAR | SEQ ID No 390 |
| KRIEHAK | SEQ ID No 391 |
| VTPWRLR | SEQ ID No 392 |
| VTPCRLR | SEQ ID No 393 |
| RWGFSKQ | SEQ ID No 394 |
| RGDDKDC | SEQ ID No 395 |
| ATRMMMG | SEQ ID No 396 |
| GPSRDPD | SEQ ID No 397 |
| VTLPRARR | SEQ ID No 398 |
| RLPYQLAQ | SEQ ID No 399 |
| LGSFLIGS | SEQ ID No 400 |
| MGDDSSNS | SEQ ID No 401 |
| PLSHLAQN | SEQ ID No 402 |
| ATEGKSVC | SEQ ID No 403 |
| HNNCEKDSV | SEQ ID No 404 |
| RTMKPLPRH | SEQ ID No 405 |
| SQRRNPWQA | SEQ ID No 406 |
| YPMKITGNR | SEQ ID No 407 |
| VSHLRSPRK | SEQ ID No 408 |
| SYPARTRKV | SEQ ID No 409 |
| WGRLRFARK | SEQ ID No 410 |
| VFLNKVMRG | SEQ ID No 411 |
| SGSGYQLV | SEQ ID No 412 |
| HSDSLGSAS | SEQ ID No 413 |
| KATVHLAYL | SEQ ID No 414 |
| CAEDYHWQWR | SEQ ID No 415 |
| QRLLVKAKTQ | SEQ ID No 416 |
| EDFLEESRNQ | SEQ ID No 417 |
| GEKAFGWPGK | SEQ ID No 418 |
| PTVSPFLRQR | SEQ ID No 419 |
| PRTVLWLTIE | SEQ ID No 420 |
| EVCWKLPQSK | SEQ ID No 421 |
| ISNRWLSIGV | SEQ ID No 422 |
| GNCSFFTETG | SEQ ID No 423 |
| DSIRGYFGET | SEQ ID No 424 |
| LHSNSFIRNNY | SEQ ID No 425 |
| TYYSETTVTRT | SEQ ID No 426 |
| TYYSRRTLLGV | SEQ ID No 427 |
| SSYFLGKLLSD | SEQ ID No 428 |
| QARLRQHYQTI | SEQ ID No 429 |
| LVFHHMAQHLMM | SEQ ID No 430 |
| YSTKITIPVIKR | SEQ ID No 431 |
| TYHSERTVTFTY | SEQ ID No 432 |
| PGSNYSEGWHIS | SEQ ID No 433 |
| LCANKKSSVKIT | SEQ ID No 434 |
| DGSPDYQKAKLQ | SEQ ID No 435 |
| VRRQLPVEEPNP | SEQ ID No 436 |
| KLNQVVRKVSAL | SEQ ID No 437 |
| ILRDYKQSSSTL | SEQ ID No 438 |
| DPAKYARWKPWLK | SEQ ID No 439 |
| QLRFNKPVRYAAT | SEQ ID No 440 |
| ELRFNKCVRLCGT | SEQ ID No 441 |
| GLKDQVNTVGIPI | SEQ ID No 442 |
| YKTSQNALDFNTKV | SEQ ID No 443 |
| PSENKENSAVPVEE | SEQ ID No 444 |
| ARTKISDDDDEHTL | SEQ ID No 445 |
| PITKWLPAYKFKEY | SEQ ID No 446 |
| SNLDEVGQQVERLD | SEQ ID No 447 |
| RATASLNANEVEWF | SEQ ID No 448 |
| EMRFSRAVRLCGTLQ | SEQ ID No 449 |
| RICSLTASEGPQQKI | SEQ ID No 450 |
| PLSPYGDIIEK | SEQ ID No 451 |
| TSESKENCTGVQVAE | SEQ ID No 452 |
| SQMNPRSPPATMCSP | SEQ ID No 453 |
| MHPDALEEPDDQNRI | SEQ ID No 454 |
| LSRMQHQSQECKSEE | SEQ ID No 455 |
| QEPNESDLPYHEMETL | SEQ ID No 456 |
| SRENSSSQDPQTEGTR | SEQ ID No 457 |
| EPSGHEKEGFMEAEQC | SEQ ID No 458 |
| KGSNYHLSDNDASDVE | SEQ ID No 459 |
| HTQSAEPPPPPEPARI | SEQ ID No 460 |
| CLISEERNECVIATEV | SEQ ID No 461 |
| ASWATNLKSSIRKANK | SEQ ID No 462 |
| TSMQPTEAMGEEPSRAE | SEQ ID No 463 |
| LSQEHRLLRHSSMADKK | SEQ ID No 464 |
| YSQKPPKRASSQLSWFS | SEQ ID No 465 |
| PRRPGEPREVHIGRALGR | SEQ ID No 466 |
| DTLSTRPGYLWVVWIYRN | SEQ ID No 467 |
| SIMNADILNYCQKESWCK | SEQ ID No 468 |
| NRGPPLDRAEVYSSKLQD | SEQ ID No 469 |
| ISKLSHSKGHQKRKALKTT | SEQ ID No 470 |
| DQNVNEAMPSLKITNDYIF | SEQ ID No 471 |
| DNSPLRRKSIYLVIIV | SEQ ID No 472 |
| QGQRSDVYSDLNTQRPYYK | SEQ ID No 473 |
| EIYLEPLKDAGDGVRYLLR | SEQ ID No 474 |
| LKHDTNIYCRMDHKAEVAS | SEQ ID No 475 |
| QWPALKEKYPKSVYLGRIV | SEQ ID No 476 |
| GKIFSSCFHNTILCMQKESE | SEQ ID No 477 |
| LDDHDYGSWGNYNNPLYDDS | SEQ ID No 478 |
| VRENHGLLPPLYKSVKTYTV | SEQ ID No 479 |
| PCTAQECLASVLKPTNETLN | SEQ ID No 480 |
| PNCNKPRWEKWFMVTFASST | SEQ ID No 481 |
| GYKAFGLVGKLAASGSITMQN | SEQ ID No 482 |
| FGRTVAIKPPKCWTGRFLMNL | SEQ ID No 483 |
| FRRTVSSKTPKCPTGRLLMNL | SEQ ID No 484 |
| NFHGMNPSKDTSTEYSEVRTQ | SEQ ID No 485 |
| HNPTLQVFRKTALLGANGAQP | SEQ ID No 486 |
| GELSLASLHIPFVETQHQTQV | SEQ ID No 487 |
| GEEGVALPANGAGGPGGASARK | SEQ ID No 488 |
| DRRSNQVARALHDHLGLRQGDC | SEQ ID No 489 |
| NHRVDASSMWLYRRYYSNVCQR | SEQ ID No 490 |
| QKMDSLDAMEGDVELEWEETTM | SEQ ID No 491 |
| FHTLRGKGQAAEPPDFNPRDSYS | SEQ ID No 492 |
| SVYQYGSALAHFFYSSDQAWYDR | SEQ ID No 493 |
| DSAEAPADPFAVPEGRSQDARGY | SEQ ID No 494 |
| SAGNGGSSLSYTNPAVAATSANL | SEQ ID No 495 |
| KAKLQSSPDYLQVLEEQTALNKI | SEQ ID No 496 |
| LLKGLGRRQACGYCVFWLLNPLPM | SEQ ID No 497 |
| SRGLQGTYQDVGSLNIGDVQLEKP | SEQ ID No 498 |
| APVVFFYLSQDSRPRSWCLRTVCN | SEQ ID No 499 |
| HFHKVQPQEPKVTDTEYSEIKIHK | SEQ ID No 500 |
| SISLHGLSQVSEDPPSVFNMPEAD | SEQ ID No 501 |
| VNNCEHFVTLLRYGEGVSEQANRA | SEQ ID No 502 |
| QNWGPRFKKLADLYGSKDTFDDDS | SEQ ID No 503 |
| KLRSDCSRPSLQWYTRAQSKMRRPS | SEQ ID No 504 |
| DHSRSTKAVSEKKAKGLGESRKDKK | SEQ ID No 505 |
| STGLTWRSGTASSVSYPKQMPLSQV | SEQ ID No 506 |
| AATVFFCLGQTTRPRSWCLRLVCNP | SEQ ID No 507 |
| YAANPVITPEPVTSPPSYSSEIQANK | SEQ ID No 508 |
| NHCVFTQRKITRPSQRPKTPPTDTSV | SEQ ID No 509 |
| TQGAKEHEEAESGEGTRRRAAEAPSM | SEQ ID No 510 |
| DHLALSRPRRLSTADPADASTIYAVVV | SEQ ID No 511 |
| STSALSEAASDTTQEPPGSHEYAALKV | SEQ ID No 512 |
| SFHKGEPQDLSGQEATNNEYSEIKIPK | SEQ ID No 513 |
| EGALHRSSMQPDNSSDSDYDLHGAQRL | SEQ ID No 514 |
| SFHKARPQYPQEQEAIGYEYSEINIPK | SEQ ID No 515 |
| SFQMVKPWDSRGQEATDTEYSEIKIHR | SEQ ID No 516 |
| IFPGGNKGGGTSCGPAQNPPNNQTPSS | SEQ ID No 517 |
| ELPTATQAQNDYGPQQKSSSSRPSCSCL | SEQ ID No 518 |
| KVPAEEPANELPMNEIEAWKAAEKKARW | SEQ ID No 519 |
| SHQWKSSEDNSKTFSASHNVEATSMFQL | SEQ ID No 520 |
| KEEEMADTSYGTVKAENIIMMETAQTSL | SEQ ID No 521 |
| NLTALDWSLLSKKECLSYGGRLLGNSCK | SEQ ID No 522 |
| SFSEMKSREPKDQEAPSTTEYSEIKTSK | SEQ ID No 523 |
| ELIKPHRAAKGAPTSTVYAQILFEENKL | SEQ ID No 524 |
| NHSVIGPNSRLARNVKEAPTEYASICVRS | SEQ ID No 525 |
| DLASQPVYCNLQSLGQAPMDEEEYVIPGH | SEQ ID No 526 |
| DYDNSENQLFLEEERRINHTAFRTVEIKR | SEQ ID No 527 |
| DHSGGHHSDKINKSESVVYADIRKN | SEQ ID No 528 |
| DHWALTQRTARAVSPQSTKPMAESITYAAVARH | SEQ ID No 529 |
| ENLIYENVAAIQAHKLEV | SEQ ID No 530 |
| SETTGLTPDQVKRNLEKYGLNELPAEEGKT | SEQ ID No 531 |
| SLCYKFLSYFRASSTMRY | SEQ ID No 532 |
| KLEKLVSSLREEDEYSIHPPSSRWKRFYRA | SEQ ID No 533 |
| SHLRKIRTCTSIMEKDLTYSSVKRHL | SEQ ID No 534 |
| ALSSSTSPRAPPSHRPLKSPQNETLYSVLKA | SEQ ID No 535 |
| DPENQNFLLESNLGKKKYETEFHPGTTSFGMS | SEQ ID No 536 |
| FTYGVRFLKKTPWLWNTRHCWYNYPYQPLTTD | SEQ ID No 537 |
| KTLRSLEATDSAFDNPDYWHSRLFPKANAQRT | SEQ ID No 538 |
| QFQNSSEMEKIPEIGKFGEKAPPAPSHVWRPAA | SEQ ID No 539 |
| TFQDSAGARNNRDGNNLRKRGHPAPSPIWRHAA | SEQ ID No 540 |
| LALSSGSRKASAVGDVVNLVSVDVQRLTESVLY | SEQ ID No 541 |
| DILRPYFDVEPAQVRSRLLESMIPIKMVNFPQK | SEQ ID No 542 |
| TCQFEGLLRPYIQHAMYDEEKGTPIFICPVSWG | SEQ ID No 543 |
| LQLDKVDVIPVTAINLYPDGPEKRAENLEDKTCI | SEQ ID No 544 |
| CPVFKGFSSSSKDQIAIPEDTPENTETASVCTKV | SEQ ID No 545 |
| NFEAQQPTQPTSASPSLTATEIIYSEVKKQ | SEQ ID No 546 |
| WSMQQPESSANIRTLLENKDSQVIYSSVKKS | SEQ ID No 547 |
| GRQPGKREPLRSVLRRALGEGAELGARGQSLPMGLL | SEQ ID No 548 |
| PDWLKDNDYLLHGHRPPMPSFRACFKSIFRIHTETG | SEQ ID No 549 |
| DGSHIHTFLDVSFSEALYPVFRILTLEPTALTICPA | SEQ ID No 550 |
| DHWALTQRTARAVSPQSTKPMAESITYAAVARH | SEQ ID No 551 |
| HSLTLRREATEPPPSQEREPPAEPSIYAPLAIH | SEQ ID No 552 |
| RFKNEFKSSGINTASSAASKERTAPHKSNTGFPKLLCA | SEQ ID No 553 |
| REKMWHGRQRLGGVGAGSRPPMPAHPTPASIFSARSTDV | SEQ ID No 554 |
| KKTHPDDSAGEASSRGRAHEEDDEENYENVPRVLLASDH | SEQ ID No 555 |
| GSAQGRRLPLRLVLQRALGDEAELGAVRETSRRGLVDIAA | SEQ ID No 556 |
| SSPTSPTSPGPQQAPPRETYLSEKIPIPDTKPGTFSLRKL | SEQ ID No 557 |
| AGFPKTRLGRLATSTSRSRQLSLCDDYEEQTDEYFFDRDP | SEQ ID No 558 |
| KSLMARRTYLEWPKEKSKRGLFWANLRAAINIKLTEQAKK | SEQ ID No 559 |
| LPWEPSLESEEEVEEEETSEALVLNPRRHQDSSRNKAGGLP | SEQ ID No 560 |
| KESDHFSTELDDITVTDTYLSATKVSFDDTCLASEVSFSQS | SEQ ID No 561 |
| QNLCSRLKTSPVEGLSGNPADLEKRRQVFGHNVIPPKKPKT | SEQ ID No 562 |
| NHCVFTQRKITRPSQRPKTPPTDIIVYTELPNAEP | SEQ ID No 563 |
| TMKTSDKFKFVFREKMGRIVDYFTIQNPSNVDH | SEQ ID No 564 |
| SENFRKAYKQVFKCHIRKDSHLSDTKESKSRIDTPPSTNCTHV | SEQ ID No 565 |
| EFMNEQKLNRYPASSLVVVRSKTEDHEEAGPLPTKVNLAHSEI | SEQ ID No 566 |
| GNYRLKEYEKALKYVRGLLQTEPQNNQAKELERLIDKAMKKDG | SEQ ID No 567 |
| PAGEEDEEEEEDLGWGCPDVAGPTRPTAPPDLHNYMRRIKEIA | SEQ ID No 568 |
| SGLREQTIAIKCLVVLVVALGLPFLAIGYWIAPCSRLGKILRS | SEQ ID No 569 |
| SGLRQQTMAVKFLVVLAVAIGLPFLALIYWFAPCSKMGKIMRG | SEQ ID No 570 |
| SGLRQQTMAVKFLVVLAVAIGLPFLALIYWFAPCSKMGKIMRG | SEQ ID No 571 |
| PPVSRAYTTACVLTTAAVQLELITPFQLYFNPELIFKHFQIWRL | SEQ ID No 572 |
| GNVLILRSVSTAVYKRFPSAQHLVQAGFMTPAEHKQLEKLSLPH | SEQ ID No 573 |
| QNWWTRRKVRQEHGPERKISFPQWEKDYNLQPMNAYGLFDEYLE | SEQ ID No 574 |
| DSNIAFSVNASDKGEASCCDPVSAAFEGCLRRLFTRWGSFCVRNP | SEQ ID No 575 |
| QVSSAESHKDLGKKDTETVYSEVRKAVPDAVESRYSRTEGSLDGT | SEQ ID No 576 |
| VLDSEPKSQASGPEPELYASVCAQTRRARASFPDQAYANSQPAAS | SEQ ID No 577 |
| ETGINLRGALLAMIYNKILRLSTSNLSMGEMTLGQINNLVAIETNQ | SEQ ID No 578 |
| AAGRARAKACRAPGSYGRGTHCHYKAPTVVLHMTKTDPSLENPTHL | SEQ ID No 579 |
| HHELLSHKSFETNAQEDTMETHLETELDLSTITTAGRISDHKQQLA | SEQ ID No 580 |
| DQKYVLILNVFPAPPKRSFLPQVLTEWYIPLEKDERHQWIVLLSFQL | SEQ ID No 581 |
| LQTVYLGKNSEAQPARQILVLDNAAIVCNFGSELSLVYVPSVLEKLD | SEQ ID No 582 |
| RKDSEEEVSLLGSQDIEEGNHQVEDGCREMACEEFNFGEILMTQVIHS | SEQ ID No 583 |
| QRRETEVYACIENEDGSSPTAKQSPLSQERPHRFEDDGELNLVYENL | SEQ ID No 584 |
| APCAKVRPYIAEGESDTDSDLCTPCGPPPRSATGEGPFGDVGWAGPRK | SEQ ID No 585 |
| ERLGYSEDGLEELSRHSVSEADRLLSARSSVDFQAFGVKGGRRINEYFC | SEQ ID No 586 |
| RQRLCRQSVLLWPHQPSGQRSFWAQLGMALTRDNHHFYNRNFCQGP | SEQ ID No 587 |
| TAE | |
| LHRDYDRTVTLLSPPRPGRLPDLQEIGVPLYQSPPGRYLSPKKGANENV | SEQ ID No 588 |
| RSPFYDRFSEARILFLLQLLADHVPGVGLVTRPLMDYLPTWQKIYFYSWG | SEQ ID No 589 |
| NPSPDTRIELNDVVYLIRPDPLAYLPNSEPSRRNSICNVTGQDSREETQL | SEQ ID No 590 |
| RDIYAQRMHTFITSLSSVGIVVSDPDSTDASSIEDNEDICNTTSLENCTAK | SEQ ID No 591 |
| SFQGLRLWEPADQEAPSTTEYSEIKIHTGQPLRGPGFGLQLEREMSGM | SEQ ID No 592 |
| VPK | |
| LVSSVADVLAQGGGPRSSQHCGEGSQLVAADHRGGLDGWEQPGAGQ | SEQ ID No 593 |
| PPSDT | |
| VVSDSGISTDYSSGDSQGAQGGLSDGPYSNPYENSLIPAAEPLPPSYVA | SEQ ID No 594 |
| CS | |
| NPPPDTRLEPSDIVYLIRSDPLAHVASSSQSRKSSCSHKLSSCNPETRDE | SEQ ID No 595 |
| TQL | |
| HPSCCWKPDPDQVDGARSLLSPEGYQLPQNRRMTHLAQKFFPKAKDE | SEQ ID No 596 |
| AASPVKG | |
| GKKFKRYFLQLLKYIPPKAKSHSNLSTKMSTLSYRPSDNVSSSTKKPAPC | SEQ ID No 597 |
| FEVE | |
| SDNFKKSFQNVLCLVKVSGTDDGERSDSKQDKSRLNETTETQRTLLNG | SEQ ID No 598 |
| DLQTSI | |
| SPTNNTVYASVTHSNRETEIWTPRENDTITIYSTINHSKESKPTFSRATAL | SEQ ID No 599 |
| DNV | |
| LGGAAYVNTFHNIALETSDEHREFAMAATCISDTLGISLSGLLALPLHDFL | SEQ ID No 600 |
| CQLS | |
| MQKDSSQETTSCYEKIFYGHLLKKFRQPNFARKLC | SEQ ID No 601 |
| ALATSKALVKFDPEIIGPRDIIKIIEEIGFHASLAQRNPNAHHLDHKMEIKQ | SEQ ID No 602 |
| WKKS | |
| NHCVFTQRKITRPSQRPKTPPTDIIVYTELPNAESRSKVVSCP | SEQ ID No 603 |
| DHCVFTQRKITRPSQRPKTPPTDTILYTELPNAKPRSKVVSCP | SEQ ID No 604 |
| ERKRIQYLHAKLLKKRSKQPLGEVKRRLSLYLTKIHFWLPVLKMIRKKQM | SEQ ID No 605 |
| DMASADKS | |
| SEWLESIRMKRYILHFHSAGLDTMECVLELTAEDLTQMGITLPGHQKRIL | SEQ ID No 606 |
| CSIQGFKD | |
| NADAKYPGYPPEHIIAEKRRARRRLLHKDGSCNVYFKHIFGEWGSYVVDI | SEQ ID No 607 |
| FTTLVDTKW | |
| HRTSKRSEARSAEFTVGRKDSSIICAEVRCLQPSEVSSTEVNMRSRTLQ | SEQ ID No 608 |
| EPLSDCEEVLC | |
| IKYWFHTPPSIPLQIEEYLKDPTQPILEALDKDSSPKDDVWDSVSIISFPEK | SEQ ID No 609 |
| EQEDVLQTL | |
| RREPRQALAGTFRDLRLRLWPQGGGWVQQVALKQVGRRWVASNPRE | SEQ ID No 610 |
| SRPSTLLTNLDRGTPG | |
| DFQWREKTPEPPVPCVPEQTEYATIVFPSGMGTSSPARRGSADGPRSA | SEQ ID No 611 |
| QPLRPEDGHCSWPL | |
| ENDEDGAQASPEPDGGVGTRDSSRTSIRSSQWSFSTISSSTQRSYNTC | SEQ ID No 612 |
| CSWTQHPLIQKNRR | |
| DEIYLESCCQARYHQKKEQMNEELKREAETLREREGEEFDNTCCAEKR | SEQ ID No 613 |
| KKLWDLLEKPNSSV | |
| DMRPPPTAMITLNNSVYWQEFEDTCVYECLDGKDCQSFFCCYEECKSG | SEQ ID No 614 |
| SWRKGRIHIDILELDS | |
| GTLAWMITLSDGLHNFIDGLAIGASFTVSVFQGISTSVAILCEEFPHELGD | SEQ ID No 615 |
| FVILLNAGMSIQQ | |
| GHNEVIGVCRVGPDAADPHGREHWAEMLANPRKPVEHWHQLVEEKTV | SEQ ID No 616 |
| TSFTKGSKGLSEKENSE | |
| PSLSTSNKNIYEVEPTVSVVQEGCGHNSSYIQNAYDLPRNSHIPGHYDLL | SEQ ID No 617 |
| PVRQSPANGPSQDKQS | |
| DEARLERCCLRRLRRREEEAAEARAGPTERGAQGSPARALGPRGRLQ | SEQ ID No 618 |
| RGRRRLRDVVDNPHSGLAGK | |
| DELSIDSCCRDRYFRRKELSETLDFKKDTEDQESQHESEQDFSQGPCPT | SEQ ID No 619 |
| VRQKLWNILEKPGSSTAAR | |
| KETKVKELKRAKTVLTVIKWKGEKSKYPQGRFWKQLQVAMPVKKSPRR | SEQ ID No 620 |
| SSSDEQGLSYSSLKNV | |
| LSYNHHRLEEHEAETYEDGFTGNPSSLSQIPETNSEETTVIFEQLHSFVV | SEQ ID No 621 |
| DDDGFIEDKYIDIHELCEEN | |
| DESSSSPGRQMSSSDGGPPGQSDTDSSVEESDFDTMPDIESDKNIIRTK | SEQ ID No 622 |
| MFLYLSDLSRKDRRIVSKKYK | |
| RIIQEKKKHAVASDPRHLRNKGSPIIYSEVKVASTPVSGSLFLASSAPHR | SEQ ID No 623 |
| AEDHLDGCCKRRYLQKIEEFAEMVEREEEDDALDSEGRDSEGPAEGEG | SEQ ID No 624 |
| RLGRCMRRLRDMVERPHSGLPGK | |
| EDPWIGSESDKFILLGYLDQLRKDPALLSSEAVLPDLTDELAPVFLLRWF | SEQ ID No 625 |
| YSASDYISDCWDSIFHNNWRE | |
| MDRKWYFLCNSWLSINVGDCVLDKVFPVATEQDRKQFSHLFFMKTSAG | SEQ ID No 626 |
| FQDGHIWYSIFSRCARSSFTRVQR | |
| VPSDPSVEEMRKVVCEQKLRPNIPNRWQSCEALRVMAKIMRECWYAN | SEQ ID No 627 |
| GAARLTALRIKKTLSQLSQQEGIKM | |
| CSDFQEDIVFPFSLGWSSLVHRFLGPRNAQRVLLGLSEPIFQLPRSLAST | SEQ ID No 628 |
| PTAPTTPATPDNASQEELMITL | |
| RIPLLGDEEEGSEDEGESTHLLPENENELEKFIHSVIISKRSKNIKKKLKEE | SEQ ID No 629 |
| QNSVTENKTKNASHNGKMEDL | |
| SKIPQITLNFVDLKGDPFLASPTSDREIIAPKIKERTHNVTEKVTQVLSLGA | SEQ ID No 630 |
| DVLPEYKLQAPRIHRWTILHY | |
| DHCIFTQRKITGPSQRSKRPSTDTSVCIELPNAEPRALSPAHEHHSQALM | SEQ ID No 631 |
| GSSRETTALSQTQLASSNVPAAGI | |
| PRARIMQRKRGLEWFVCDGWKFLCTSCCGWLINICRRKKELKARTVWL | SEQ ID No 632 |
| GCPEKCEEKHPRNSIKNQKYNVFTFI | |
| SPRHYYSGYSSSPEYSSESTHKIWERFRPYKKHHREEVYMAAGHALRK | SEQ ID No 633 |
| KVQFAKDEDLHDILDYWKGVSAQQKL | |
| SPQYHSLSYSSSPEYTCRASQSIWERFRLSRRRHKEEEEFMAAGHALR | SEQ ID No 634 |
| KKVQFAKDEDLHDILDYWKGVSAQHKS | |
| MAFNAKVSDPLIGGTYMTLLNTVSNLGGNWPSTVALWLVDPLTVKECVG | SEQ ID No 635 |
| ASNQNCRTPDAVELCKKLGGSCVTALD | |
| YYPHGHSHSLGLDLNLGLGSGTFHSLGNALVHGGELEMGHGGTHGFG | SEQ ID No 636 |
| YGVGHGLSHIHGDGYGVNHGGHYGHGGGH | |
| SFHKVKPQDPQGQEATDSEYSEIKIHKRETAETQACLRNHNPSSKEVRG | SEQ ID No 637 |
| NNSTSANRNVYEVEPTVSVVQGVFSNNGRLSQDPYDLPKNSHIPCHYD | SEQ ID No 638 |
| LLPVRDSSSSPKQEDSGGSSSNSSSSSE | |
| RREFRKALKSLLWRIASPSITSMRPFTATTKPEHEDQGLQAPAPPHAAAE | SEQ ID No 639 |
| PDLLYYPPGVVVYSGGRYDLLPSSSAY | |
| NELFIDSCCSNRYQERKEENHEKDWDQKSHDVSTDSSFEESSLFEKELE | SEQ ID No 640 |
| KFDTLRFGQLRKKIWIRMENPAYCLSAK | |
| NEFFIDSCCSYSYHGRKVEPEQEKWDEQSDQESTTSSFDEILAFYNDAS | SEQ ID No 641 |
| KFDGQPLGNFRRQLWLALDNPGYSVLSR | |
| DATDQESLELKPTSRAGIKQKGLLLSSSLMHSESELDSDDAIFTWPDREK | SEQ ID No 642 |
| GKLLHGQNGSVPNGQTPLKARSPREEIL | |
| SRGASIPGTPPTAGRVVSLSPEDAPGPSLRRSGGCSPSSDTVFGPGAP | SEQ ID No 643 |
| AAAGAEACRRENRGTLYGTRSFTVSVAQKR | |
| NKTFSPAQRHGNSGITMMRKKAKFSLRENPVEETKGEAFSDGNIEVKLC | SEQ ID No 644 |
| EQTEEKKKLKRHLALFRSELAENSPLDSGH | |
| YESHRAGCEKYEGPYPQHPFYSSASGDVIGGLSREEIRQMYESSELSRE | SEQ ID No 645 |
| EIQERMRVLELYANDPEFAAFVREQQVEEV | |
| FKNSDKEDDQEHPSEKQPSGAESGTLARASLALPTSSLSRTASQSSSH | SEQ ID No 646 |
| RGWEILRQNTLGHLNLGLNLSEGDGEEVYHF | |
| QDLKGDDTAVRDAHSKRDTKCQPQGSSGEEKGTPTTLRGGEASERKR | SEQ ID No 647 |
| PDSGCSTSKDTKYQSVYVISEEKDECVIATEV | |
| DHCVFIQRKISRPSQRPKTPLTDTSVYTELPNAEPRSKVVSCPRAPQSGL | SEQ ID No 648 |
| EGVF | |
| RDLPPLSSSEMEEFLTQESKKHENEFNEEVALTEIYKYIVKYFDEILNKLE | SEQ ID No 649 |
| RERGLEEAQKQLLHVKVLFDEKKKCKWM | |
| LGSPTSPGPGHYLRCDSTQPLLAGLTPSPKSYENLWFQASPLGTLVTPA | SEQ ID No 650 |
| PSQEDDCVFGPLLNFPLLQGIRVHGMEALGSF | |
| LSQPGPTLPKTHVKTASLGLAGKARSPLLPVSVPTAPEVSEESHKPTED | SEQ ID No 651 |
| SANVYEQDDLSEQMASLEGLMKQLNAITGSAF | |
| ATECGQGEEKSEGPLGSQESESCGLRKEEKEPHADKDFCQEKQVAYC | SEQ ID No 652 |
| PSGKPEGLNYACLTHSGYGDGSD | |
| KELILAVDGVLSVHSLHIWSLTMNQVILSAHVATAASRDSQVVRREIAKAL | SEQ ID No 653 |
| SKSFTMHSLTIQMESPVDQDPDCLFCEDPCD | |
| TSFPRLPEDEPAPAAPLRGRKDEDAFLGDPDTDPDSFLKSARLQRLPSS | SEQ ID No 654 |
| SSEMGSQDGSPLRETRKDPFSAAAAECSCRQDG | |
| LEKERELQQLGITEYLRKNIAQLQPDMEAHYPGAHEELKLMETLMYSRP | SEQ ID No 655 |
| RKVLVEQTKNEYFELKANLHAEPDYLEVLEQQT | |
| KNSLKEANHDGDFGITLAELRALMELRSTDALRKIQESYGDVYGICTKLK | SEQ ID No 656 |
| TSPNEGLSGNPADLERREAVFGKNFIPPKKPKT | |
| YNCLDFPAGVVPVTTVTAEDEAQMEHYRGYFGDIWDKMLQKGMKKSV | SEQ ID No 657 |
| GLPVAVQCVALPWQEELCLRFMREVERLMTPEKQSS | |
| PAFDLLSRKMLGCPINDLNVILLFLRANISELISFSWLSVLCVLKDTTTQKH | SEQ ID No 658 |
| NIDTVVDFMTLLAGLEPSKPKHLTNSACDEHP | |
| SRRFQAAFQNVISSFHKQWHSQHDPQLPPAQRNIFLTECHFVELTEDIG | SEQ ID No 659 |
| PQFPCQSSMHNSHLPAALSSEQMSRTNYQSFHFNKT | |
| ELKTTRFHPNRQSSMYTVTRMESMTVVFDPNDADTTRSSRKKRATPRD | SEQ ID No 660 |
| PSFNGCSRRNSKSASATSSFISSPYTSVDEYS | |
| SRQCKQFAKDLLDQTRSSRELEIILNYRDDNSLIEEQSGNDLARLKLAIKY | SEQ ID No 661 |
| RQKEFVAQPNCQQLLASRWYDEFPGWRRRHWAVK | |
| VRKKQKAQHRCMRRVGRTGSRRSGYAFSHQEGFGELIMSGKNMRLSS | SEQ ID No 662 |
| LALSSFTTRSSSSWIESLRRKKSDSASSPSGGADKPLKG | |
| LLKLMFVNPPELPEQTTKALPVRFLFTDYNRLSSVGGETSLAEMIATLSD | SEQ ID No 663 |
| ACEREFGFLATRLFRVFKTEDTQGKKKWKKTCCLPS | |
| PPYLGKLDVSFQRACQCEGKDNRIPLLKEVFEAFPNTPINIDIKVNNNVLI | SEQ ID No 664 |
| KKVSELVKRYNREHLTVWGNANYEIVEKCYKENSD | |
| VVAAMQARHAHVPQLRWETMDVRKLDFPSASFDVVLEKGTLDALLAGE | SEQ ID No 665 |
| RDPWTVSSEGVHTVDQVLSEVGFQKGTRQLLGSRTQLE | |
| SAEVQAVLRKFDELDAVMSRLPHHSESRQEHERISRIHEEFKKKKNDPT | SEQ ID No 666 |
| FLEKKERCDYLKNKLSHIKQRIQEYDKVMNWDVQGYS | |
| AERVKELPSAGLVHYNFCTLPKRQFAPSYESRRQNQDRINKTVLYGTPR | SEQ ID No 667 |
| KCFVGQSKPNHPLLQAKPQSEPDYLEVLEKQTAISQL | |
| NLPPNPKRQQRKPKGNKNSILATEQEITYAELNLQKASQDFQGNDKTYH | SEQ ID No 668 |
| CKDLPSAPEK | |
| EKPESRTSIHNFMAHPEFRIEDSQPHIPLIDDTDLEEDAALKQNSSPPSSL | SEQ ID No 669 |
| NKNNSAIDSGINLTTDTSKSATSSSPGSPIHSLETSL | |
| EKPESRSSIHNFMTHPEFRIEDSEPHIPLIDDTDAEDDAPTKRNSSPPPSP | SEQ ID No 670 |
| NKNNNAVDSGIHLTIEMNKSATSSSPGSPLHSLETSL | |
| QGDPQRSPSSCNDLYATVKDFEKTPNSTLPPAGRPSEEPEPDYEAIQTL | SEQ ID No 671 |
| NREEEKATLGTNGHHGLVPKENDYESISDLQQGRDITRL | |
| KVAMIEPGYFKTAVTSKERFLKSFLEIWDRSSPEVKEAYGEKFVADYKKS | SEQ ID No 672 |
| AEQMEQKCTQDLSLVTNCMEHALIACHPRTRYSAGWDAK | |
| EKPESKTSIHNFMATPEFLINDYTHNIPLIDDTDVDENEERLRAPPPPSPN | SEQ ID No 673 |
| QNNNAIDSGIYLTTHVTKSATSSVFSSSPGSPLHSVETSL | |
| PAAPLAGPALPARRLSRASRPLSASQPSLPHGAPGPAASTRPASSSTPR | SEQ ID No 674 |
| LGPTPAARAAAPSPDRRDSASPGAAGGLDPQDSARSRLSSNL | |
| SKHFRKGFRTICAGLLGRAPGRASGRVCAAARGTHSGSVLERESSDLLH | SEQ ID No 675 |
| MSEAAGALRPCPGASQPCILEPCPGPSWQGPKAGDSILTVDVA | |
| SNAKIAYKQNKANTAQEQQYGSHEENLPADLEALQREIRMAQERLDLAV | SEQ ID No 676 |
| QAYSHQNNPHGPREKKAKVGSKAGSNKSTASSKSGDGKTSVWI | |
| QNEEESGEPEQAAGDAPPPYSSISAESAAYFDYKDESGFPKPPSYNVAT | SEQ ID No 677 |
| TLPSYDEAERTKAEATIPLVPGRDEDFVGRDDFDDADQLRIGNDG | |
| EGDPQTQLQDDKDPMLILRGRVPEGRALDSEVDPDPEGDLGVRGPVFG | SEQ ID No 678 |
| EPSAPPHTSGVSLGESRSSEVDVSDLGSRNYSARTDFYCLVSKDDM | |
| LLGDFLRACFVRFMNYCWCWDLEAGFPSYAEFDISGNVLGLIFNQGMIW | SEQ ID No 679 |
| MGSFYAPGLVGINVLRLLTSMYFQCWAVMSSNVPHERVFKASRSNN | |
| TIEPVQQAGCSATRLPGDGQTSAGDASLQDPPSYPPVQVIRARVSSGSS | SEQ ID No 680 |
| SEVSSINSDLEWDPEDVNLEGSKENVELLGSQVHQDSVRTAHLSDDD | |
| RRTLKQAFADCTVILCEHRIEAMLECQQFLVIEENKVRQYDSIQKLLNERS | SEQ ID No 681 |
| LFRQAISPSDRVKLFPHRNSSKCKSKPQIAALKEETEEEVQDTRL | |
| VKAFHSSLHESIQKPYNQKSIHSFMTHPEFAIEEELPRTPLLDEEEEENPD | SEQ ID No 682 |
| KASKFGTRVLLLDGEVTPYANTNNNAVDCNQVQLPQSDSSLQSLETSV | |
| NLPKGKKPAPQAAEPNNHTEYASIQTSPQPASEDTLTYADLDMVHLNRT | SEQ ID No 683 |
| PKQPAPKPEPSFSEYASVQVPRK | |
| TLQLAGTSPQKATTKLSSAQVDQVEVEYVTMASLPKEDISYASLTLGAED | SEQ ID No 684 |
| QEPTYCNMGHLSSHLPGRGPEEPTEYSTISRP | |
| ETGPKHIPLQTLLKFMVDIALGMEYLSNRNFLHRDLAARNCMLRDDMTV | SEQ ID No 685 |
| CVADFGLSKKIYSGDYYRQGRIAKMPVKWIAIESLADRVYTSKSDVWAF | |
| GVTMWEIATRGMTPYPGVQNHEMYDYLLHGHRLKQPEDCLDELYEIMY | |
| SCWRTDPLDRPTFSVLRLQLEKLLESLPDVRNQADVIYVNTQLLESSEGL | |
| AQGSTLAPLDLNIDPDSIIASCTPRAAISVVTAEVHDSKPHEGRYILNGGS | |
| EEWEDLTSAPSAAVTAEKNSVLPGERLVRNGVSWSHSSMLPLGSSLPD | |
| ELLFADDSSEGSEVLM | |

TABLE 5
Examples of naturally occurring intracellular domains
between ITIM and ITSM from proteins that have ITIM. *ITSM motif
and vary in length from 7-1882 (Table 4 comprises SEQ ID No 686
to SEQ ID No 717)

| | |
|---|---|
| KEEEMAD | SEQ ID No 686 |
| NFHGMNPSKDTS | SEQ ID No 687 |
| HFHKVQPQEPKVTD | SEQ ID No 688 |
| ELIKPHRAAKGAPTS | SEQ ID No 689 |
| SFQMVKPWDSRGQEATD | SEQ ID No 690 |
| QVSSAESHKDLGKKDTE | SEQ ID No 691 |
| SFSEMKSREPKDQEAPST | SEQ ID No 692 |
| SFQGLRLWEPADQEAPST | SEQ ID No 693 |
| NLPKGKKPAPQAAEPNNH | SEQ ID No 694 |
| NHSVIGPNSRLARNVKEAP | SEQ ID No 695 |
| DFQWREKTPEPPVPCVPEQ | SEQ ID No 696 |
| DHLALSRPRRLSTADPADAS | SEQ ID No 697 |
| SPTNNTVYASVTHSNRETEIWTPRENDTI | SEQ ID No 698 |
| DGLRDRRSFHGPYTVQAGLPLNPMGRTGLRGRGSLSCFGPNH | SEQ ID No 699 |
| MRIKMCLIKLCKSKAKSCENDLEMGMLNSKFKKTRYQAGMRNSENLTAN | SEQ ID No 700 |
| NTLSKP | |
| QDLKGDDTAVRDAHSKRDTKCQPQGSSGEEKGTPTTLRGGEASERKR | SEQ ID No 701 |
| PDSGCSTSKD | |
| KQQMEKGPIDAITGEARYSLSEDKLIRQQIDYKTLTLHCVCPENEGSAQV | SEQ ID No 702 |
| PVKVLNCDSITQAKDKLLD | |
| TLQLAGTSPQKATTKLSSAQVDQVEVEYVTMASLPKEDISYASLTLGAED | SEQ ID No 703 |
| QEPTYCNMGHLSSHLPGRGPEEP | |
| EDDSDVEWKFARSKLWLSYFDDGKTLPPPFSLVPSPKSFVYFIMRIVNFP | SEQ ID No 704 |
| KCRRRRLQKDIEMGMGNSKSRLNLFTQSNSRVFESHSFNSILNQP | |
| RKVPSFTFTPTVTYQRGGEAVSSGGRPGLLNISEPAAQPWLADTWPNT | SEQ ID No 705 |
| GNNHNDCSISCCTAGNGNSDSNLTTYSRPADCIANYNNQLDNKQTNLM | |
| LPES | |
| GDQPVYLPTQMLVKFMADIASGMEYLSTKRFIHRDLAARNCMLNENMSV | SEQ ID No 706 |
| CVADFGLSKKIYNGDYYRQGRIAKMPVKWIAIESLADRVYTSKSDVWSF | |
| GVTMWEIATRGQ | |
| ETGPKHIPLQTLLKFMVDIALGMEYLSNRNFLHRDLAARNCMLRDDMTV | SEQ ID No 707 |
| CVADFGLSKKIYSGDYYRQGRIAKMPVKWIAIESLADRVYTSKSDVWAF | |
| GVTMWEIATRGM | |
| FEFCDLGDLKAYLRSEQEHMRGDSQTMLLQRMACEVAAGLAAMHKLHF | SEQ ID No 708 |
| LHSDLALRNCFLTSDLNVKVGDYGIGFSRYKEDYIETDDKKVFPLRWTAP | |
| ELVTSFQDRLLTADQ | |
| LEAPVGREARKWLQLAVFCSPLVPGQSHLQLRIYFLNNTPCALQWALTN | SEQ ID No 709 |
| EQPHGGRLRGPCQLFDFNGARGDQCLKLTYISEGWENVDDSSCQLVP | |
| HLHIWHGKCPFRSFCFRRKAADENEDCSALTNEIIVTMHTFQDGLE | |
| QRSLYDRPASYKKKSMLDSEVKNLLSDDNSEGLTLLDLLSFTYQVARGM | SEQ ID No 710 |
| EFLASKNCVHRDLAARNVLLAQGKIVKICDFGLARDIMHDSNYVSKGSTF | |
| LPVKWMAPESIFDNLYTTLSDVWSYGILLWEIFSLGGTPYPGMMVDS | |
| KECAGEPLFSLFCAIKQQMEKGPIDAITGEARYSLSEDKLIRQQIDYKTLV | SEQ ID No 711 |
| LSCVSPDNANSPEVPVKILNCDTITQVKEKILDAIFKNVPCSHRPKAADMD | |
| LEWRQGSGARMILQDEDITTKIENDWKRLNTLAHYQVPDGSVVALVSKQV | |
| TVTESYTTSDTLKPSVHVHDNRPASNVVVTERVVGPISGADLHGMLEMP | SEQ ID No 712 |
| DLRDGSNVIVTERVIAPSSSLPTSLTIHHPRESSNVVVTERVIQPTSGMIG | |
| SLSMHPELANAHNVIVTERVVSGAGVTGISGTTGISGGIGSSGLVGTSMG | |
| AGSGALSGAGISGGGIGLSSLGGTASIGHMRSSSDHHFNQTIGSASPST | |
| ARSRI | |
| NPEYFSAADVYVPDEWEVAREKITMSRELGQGSFGMVYEGVAKGVVKD | SEQ ID No 713 |
| EPETRVAIKTVNEAASMRERIEFLNEASVMKEFNCHHVVRLLGVVSQGQ | |
| PTLVIMELMTRGDLKSYLRSLRPEMENNPVLAPPSLSKMIQMAGEIADG | |
| MAYLNANKFVHRDLAARNCMVAEDFTVKIGDFGMTRDIYETDYYRKGG | |
| KGLLPVRWMSPESLKDGVF | |
| GGAYVGPTQNRILRLSKELGIETYKVNVSERLVQYVKGKTYPFRGAFPP | SEQ ID No 714 |
| VWNPIAYLDYNNLWRTIDNMGKEIPTDAPWEAQHADKWDKMTMKELID | |
| KICWTKTARRFAYLFVNINVTSEPHEVSALWFLWYVKQCGGTTRIFSVTN | |
| GGQERKFVGGSGQVSERIMDLLGDQVKLNHPVTHVDQSSDNIIIETLNH | |
| EHYECKYVINAIPPTLTAKIHFRPELPAERNQLIQRLPMGAVIKCMMYYKE | |
| AFWKKKDYCGCMIIEDEDAPISITLDDTKPDGSLPAIMGFILARKADRLAK | |
| LHKEIRKKKICELYAKVLGSQEALHPVHYEEKNWCEEQYSGGCYTAYFP | |
| PGIM | |
| GGSYVGPTQNRILRLAKELGLETYKVNEVERLIHHVKGKSYPFRGPFPPV | SEQ ID No 715 |
| WNPITYLDHNNFWRTMDDMGREIPSDAPWKAPLAEEWDNMTMKELLD | |
| KLCWTESAKQLATLFVNLCVTAETHEVSALWFLWYVKQCGGTTRIISTTN | |
| GGQERKFVGGSGQVSERIMDLLGDRVKLERPVIYIDQTRENVLVETLNH | |
| EMYEAKYVISAIPPTLGMKIHFNPPLPMMRNQMITRVPLGSVIKCIVYYKE | |
| PFWRKKDYCGTMIIDGEEAPVAYTLDDTKPEGNYAAIMGFILAHKARKLA | |
| RLTKEERLKKLCELYAKVLGSLEALEPVHYEEKNWCEEQYSGGCYTTYF | |
| PPGIL | |
| KGKKFIVVCGNITVDSVTAFLRNFLRDKSGEINTEIVFLGETPPSLELETIF | SEQ ID No 716 |
| KCYLAYTTFISGSAMKWEDLRRVAVESAEACLIIANPLCSDSHAEDISNIM | |
| RVLSIKNYDSTTRIIIQILQSHNKVYLPKIPSWNWDTGDNIICFAELKLGFIA | |
| QGCLVPGLCTFLTSLFVEQNKKVMPKQTWKKHFLNSMKNKILTQRLSDD | |
| FAGMSFPEVARLCFLKMHLLLIAIEYKSLFTDGFCGLILNPPPQVRIRKNTL | |
| GFFIAETPKDVRRALFYCSVCHDDVFIPELITNCGCKSRSRQHITVPSVKR | |
| MKKCLKGISSRISGQDSPPRVSASTSSISNFTTRTLQHDVEQDSDQLDSS | |
| GMFHWCKPTSLDKVTLKRTGKSKYKFRNHIVACVFGDAHSAPMGLRNF | |
| VMPLRASNYTRKELKDIVFIGSLDYLQREWRFLWNFPQIYILPGCALYSG | |
| DLHAANIEQCSMCAVLSPPPQPSSNQTLVDTEAIMATLTIGSLQIDSSSD | |
| PSPSVSEETPGYTNGHNEKSNCRKVPILTELKNPSNIHFIEQLGGLEGSL | |
| QETNLHLSTAFSTGTVFSGSFLDSLLATAFYNYHVLELLQMLVTGGVSSQ | |
| LEQHLDKDKVYGVADSCTSLLSGRNRCKLGLLSLHETILSDVNPRNTFG | |
| QLFCGSLDLFGILCVGLYRIIDEEELNPENKRFVITRPANEFKLLPSDLVFC | |
| AIPFSTACYKRNEEFSLQKSYEIVNKASQTTETHSDTNCPPTIDSVTE | |
| ASLIRGNRSNCALFSTNLDWLVSKLDRLEASSGILEVLYCVLIESPEVLNII | SEQ ID No 717 |
| QENHIKSIISLLDKHGRNHKVLDVLCSLCVCNGVAVRSNQDLITENLLPGR | |
| ELLLQTNLINYVTSIRPNIFVGRAEGTTQYSKWYFEVMVDEVTPFLTAQA | |
| THLRVGWALTEGYTPYPGAGEGWGGNGVGDDLYSYGFDGLHLWTGH | |
| VARPVTSPGQHLLAPEDVISCCLDLSVPSISFRINGCPVQGVFESFNLDG | |
| LFFPVVSFSAGVKVRFLLGGRHGEFKFLPPPGYAPCHEAVLPRERLHLE | |
| PIKEYRREGPRGPHLVGPSRCLSHTDFVPCPVDTVQIVLPPHLERIREKL | |
| AENIHELWALTRIEQGWTYGPVRDDNKRLHPCLVDFHSLPEPERNYNLQ | |
| MSGETLKTLLALGCHVGMADEKAEDNLKKTKLPKTYMMSNGYKPAPLD | |
| LSHVRLTPAQTTLVDRLAENGHNVWARDRVGQGWSYSAVQDIPARRNP | |
| RLVPYRLLDEATKRSNRDSLCQAVRTLLGYGYNIEPPDQEPSQVENQSR | |
| CDRVRIFRAEKSYTVQSGRWYFEFEAVTTGEMRVGWARPELRPDVELG | |
| ADELAYVFNGHRGQRWHLGSEPFGRPWQPGDVVGCMIDLTENTIIFTLN | |
| GEVLMSDSGSETAFREIEIGDGFLPVCSLGPGQVGHLNLGQDVSSLRFF | |
| AICGLQEGFEPFAINMQRPVTTWFSKGLPQFEPVPLEHPHYEVSRVDGT | |
| VDTPPCLRLTHRTWGSQNSLVEMLFLRLSLPVQFHQHFRCTAGATPLAP | |
| PGLQPPAEDEARAAEPDPDYENLRRSAGGWSEAENGKEGTAKEGAPG | |
| GTPQAGGEAQPARAENEKDATTEKNKKRGFLFKAKKVAMMTQPPATPT | |
| LPRLPHDVVPADNRDDPEIILNTT | |

TABLE 6
Examples of naturally occurring N-terminal flanking regions of
ITSM only intracellular domains that could vary in length from
0-2002 (Table 6 comprises SEQ ID No 718 to SEQ ID No 805)

| | |
|---|---|
| V | |
| AM | |
| NLMSY | SEQ ID No 718 |
| SRFKRQ | SEQ ID No 719 |
| MDDSDTP | SEQ ID No 720 |
| YGKKRNR | SEQ ID No 721 |
| KSQWIKE | SEQ ID No 722 |
| CRGLAPEE | SEQ ID No 723 |
| RLCSAMKQ | SEQ ID No 724 |
| YRKREWIKE | SEQ ID No 725 |
| RKMKRSSSEIK | SEQ ID No 726 |
| FCNMRRPAHADIK | SEQ ID No 727 |
| LRTVKRANGGELK | SEQ ID No 728 |
| MEQHVGIDVLKRDP | SEQ ID No 729 |
| LEQHVDPHVLQNKP | SEQ ID No 730 |
| RNKDVKDAIRKIIN | SEQ ID No 731 |
| VDFRPPPQGPSGPEV | SEQ ID No 732 |
| DRYFALVQPFRLTRWR | SEQ ID No 733 |
| VRMTSEIETNIVAVERI | SEQ ID No 734 |
| MERLWGLFQRAQQLSPRSSQ | SEQ ID No 735 |
| MAEPQAESEPLLGGARGGGGDWPAGL | SEQ ID No 736 |
| PETKGVALPETMKDAENLGRKAKPKEN | SEQ ID No 737 |
| MEDEAVLDRGASFLKHVCDEEEVEGHH | SEQ ID No 738 |
| YKMYGSEMLHKRDPLDEDEDTDISYKKLKEEEMAD | SEQ ID No 739 |
| RHVSDLHGLTELILLPPPCPASFNADEDDRVDILGPQPESHQQLSASSH | SEQ ID No 740 |
| CSRAARGTIGARRTGQPLKEDPSAVPVFSVDYGELDFQWREKTPEPPV | SEQ ID No 741 |
| PCVPEQ | |
| RRKSIKKKRALRRFLETELVEPLTPSGTAPNQAQLRILKETELKRVKVLGS | SEQ ID No 742 |
| GAFG | |
| RIRQKKAQGSTSSTRLHEPEKNAREITQDTNDITYADLNLPKGKKPAPQA | SEQ ID No 743 |
| AEPNNH | |
| AVTISLAYSVKKMMKDNNLVRHLDACETMGNATAICSDKTGTLTTNRMT | SEQ ID No 744 |
| VVQSYLGD | |
| CCRKKRREEKYEKEVHHDIREDVPPPKSRTSTARSYIGSNHSSLGSMSP | SEQ ID No 745 |
| SNMEGYSK | |
| KRRQQKIRKYTMRRLLQETELVEPLTPSGAMPNQAQMRILKETELRKVK | SEQ ID No 746 |
| VLGSGAFG | |
| KYLQKPMYEVQWKVVEEINGNNYVYIDPTQLPYDHKWEFPRNRLSFGK | SEQ ID No 747 |
| TLGAGAFGKVVEA | |
| YTTYPLLKESALILLQTVPKQIDIRNLIKELRNVEGVEEVHELHVWQLAGS | SEQ ID No 748 |
| RIIATAHIKCEDP | |
| AANAIAQSCQPSFYDGTIIVKKLPYLPRILGRNIGSHHVRVEHFMNHSITTL | SEQ ID No 749 |
| AKDTPLEEVVKVVTSTDV | |
| WLHRRLPPQPIRPLPRFAPLVKTEPQRPVKEEEPKIPGDLDQEPSLLYAD | SEQ ID No 750 |
| LDHLALSRPRRLSTADPADAS | |
| KKYQPYKVIKQKLEGRPETEYRKAQTFSGHEDALDDFGIYEFVAFPDVS | SEQ ID No 751 |
| GVSRIPSRSVPASDCVSGQDLHS | |
| MDEINNKIEEEKLVKANITLWEANMIKAYNASFSENSTGPPFFVHPADVP | SEQ ID No 752 |
| RGPCWETMVGQEFVRLTVSDVL | |
| KTHRRKAARTAVGRNDTHPTTGSASPKHQKKSKLHGPTETSSCSGAAP | SEQ ID No 753 |
| TVEMDEELHYASLNFHGMNPSKDTS | |
| RVKTRRKKAAQPVQNTDDVNPVMVSGSRGHQHQFQTGIVSDHPAEAG | SEQ ID No 754 |
| PISEDEQELHYAVLHFHKVQPQEPKVTD | |
| IVLRRRRKRVNTKRSSRAFRAHLRAPLKGNCTHPEDMKLCTVIMKSNGS | SEQ ID No 755 |
| FPVNRRRVEAARRAQELEMEMLSSTSPPER | |
| KARRKQAAGRPEKMDDEDPIMGTITSGSRKKPWPDSPGDQASPPGDA | SEQ ID No 756 |
| PPLEEQKELHYASLSFSEMKSREPKDQEAPST | |
| KICRKEARKRAAAEQDVPSTLGPISQGHQHECSAGSSQDHPPPGAATY | SEQ ID No 757 |
| TPGKGEEQELHYASLSFQGLRLWEPADQEAPST | |
| QRVVCQRYAGANGPFPHEYVSGTPHVPLNFIAPGGSQHGPFTGIACGK | SEQ ID No 758 |
| SMMSSVSLMGGRGGVPLYDRNHVTGASSSSSSSTKA | |
| VRSCRKKSARPAAGVGDTGIEDANAVRGSASQGPLTEPWAEDSPPDQP | SEQ ID No 759 |
| PPASARSSVGEGELQYASLSFQMVKPWDSRGQEATD | |
| FVAKIARPKNRAFSIRFTDTAVVAHMDGKPNLIFQVANTRPSPLTSVRVS | SEQ ID No 760 |
| AVLYQERENGKLYQTSVDFHLDGISSDECPFFIFPL | |
| QLRRRGKTNHYQTTVEKKSLTIYAQVQKPGPLQKKLDSFPAQDPCTTIY | SEQ ID No 761 |
| VAATEPVPESVQETNSI | |
| ILAKISRPKKRAKTITFSKNAVISKRGGKLCLLIRVANLRKSLLIGSHIYGKL | SEQ ID No 762 |
| LKTTVTPEGETIILDQININFVVDAGNENLFFISPL | |
| FLAKIARPKKRAETIRFSQHAVVASHNGKPCLMIRVANMRKSLLIGCQVT | SEQ ID No 763 |
| GKLLQTHQTKEGENIRLNQVNVTFQVDTASDSPFLILPL | |
| WFLKRERQEEYIEEKKRVDICRETPNICPHSGENTEYDTIPHTNRTILKED | SEQ ID No 764 |
| PAN | |
| KCYFLRKAKAKQMPVEMSRPAVPLLNSNNEKMSDPNMEANSHYGHND | SEQ ID No 765 |
| DVRNHAMKPINDNKEPLNSDVQYTEVQVSSAESHKDLGKKDTE | |
| LRKRRDSLSLSTQRTQGPAESARNLEYVSVSPTNNTVYASVTHSNRETE | SEQ ID No 766 |
| IWTPRENDTI | |
| RLFKRRQGRIFPEGSCLNTFTKNPYAASKKTIYTYIMASRNTQPAESRIYD | SEQ ID No 767 |
| EILQSKVLPSKEEPVN | |
| RRHQGKQNELSDTAGREINLVDAHLKSEQTEASTRQNSQVLLSETGIYD | SEQ ID No 768 |
| NDPDLCFRMQEGSEVYSNPCLEENKPGIVYASLNHSVIGPNSRLARNVK | |
| EAP | |
| KYRHKRFAVSEQGNIPHSHDWVWLGNEVELLENPVDITLPSEECTTMID | SEQ ID No 769 |
| RGLQFEERNFLLNGSSQKTFHSQLLRPSDYVYEKEIKNEPMNSSGPKRK | |
| RVKF | |
| NSSYQEIEDDSDVEWKFARSKLWLSYFDDGKTLPPPFSLVPSPKSFVYFI | SEQ ID No 770 |
| MRIVNFPKCRRRRLQKDIEMGMGNSKSRLNLFTQSNSRVFESHSFNSIL | |
| NQP | |
| WRMMKYQQKAAGMSPEQVLQPLEGDLCYADLTLQLAGTSPQKATTKLS | SEQ ID No 771 |
| SAQVDQVEVEYVTMASLPKEDISYASLTLGAEDQEPTYCNMGHLSSHLP | |
| GRGPEEP | |
| NNSYQEIEEDADVEWKFARAKLWLSYFDEGRTLPAPFNLVPSPKSFYYLI | SEQ ID No 772 |
| MRIKMCLIKLCKSKAKSCENDLEMGMLNSKFKKTRYQAGMRNSENLTAN | |
| NTLSKP | |
| QSVFNKRKSRVRHYLVKCPQNSSGETVTSVTSLAPLQPKKGKRQKEKP | SEQ ID No 773 |
| DIPPAVPAKAPIAPTFHKPKLLKPQRKVTLPKIAEENLTYAELELIKPHRAA | |
| KGAPTS | |
| YRHRKKRNGLTSTYAGIRKVPSFTFTPTVTYQRGGEAVSSGGRPGLLNI | SEQ ID No 774 |
| SEPAAQPWLADTWPNTGNNHNDCSISCCTAGNGNSDSNLTTYSRPAD | |
| CIANYNNQLDNKQTNLMLPES | |
| RYQRWKSKLYSIVCGKSTPEKEGELEGTTTKPLAPNPSFSPTPGFTPTL | SEQ ID No 775 |
| GFSPVPSSTFTSSSTYTPGDCPNFAAPRREVAPPYQGADPILATALASD | |
| PIPNPLQKWEDSAHKPQSLDTDDPA | |
| VRLRLQKHRPPADPCRGETETMNNLANCQREKDISVSIIGATQIKNTNKK | SEQ ID No 776 |
| ADFHGDHSADKNGFKARYPAVDYNLVQDLKGDDTAVRDAHSKRDTKC | |
| QPQGSSGEEKGTPTTLRGGEASERKRPDSGCSTSKD | |
| RAWVVFKLSSAPRLHEQRVRDIQKQVREWKEQGSKTFMCTGRPGWLT | SEQ ID No 777 |
| VSLRVGKYKKTHKNIMINLMDILEVDTKKQIVRVEPLVTMGQVTALLTSIG | |
| WTLPVLPELDDLTVGGLIMGTGIESSSHKYGLFQHIC | |
| TRDLVDDMGRHKSDRAINNRPCQILMGKSFKQKKWQDLCVGDVVCLRK | SEQ ID No 778 |
| DNIVPADMLLLASTEPSSLCYVETVDIDGETNLKFRQALMVTHKELATIKK | |
| MASFQGTVTCEAPNSRMHHFVGCLEWNDKKYSLDIGNLLLRGCRIRNTD | |
| VFDPLGGKMAPYSSAGPSHLDSHDSSQLLNGLKTAATSVWETRIKLLCC | SEQ ID No 779 |
| CIGKDDHTRVAFSSTAELFSTYFSDTDLVPSDIAAGLALLHQQQDNIRNN | |
| QEPAQVVCHAPGSSQEADLDAELENCHHYMQFAAAAYGWPLYIYRNPL | |
| TGLCRIGGDCCRSRT | |
| WRRKRKEKQSETSPKEFLTIYEDVKDLKTRRNHEQEQTFPGGGSTIYSM | SEQ ID No 780 |
| IQSQSSAPTSQEPAYTLYSLIQPSRKSGSRKRNHSPSFNS | |
| RKRNNSRLGNGVLYASVNPEYFSAADVYVPDEWEVAREKITMSRELGQ | SEQ ID No 781 |
| GSFGMVYEGVAKGVVKDEPETRVAIKTVNEAASMRERIEFLNEASVMKE | |
| FNCHHVVRLLGVVSQGQPTLVIMELMTRGDLKSYLRSLRPEMENNPVLA | |
| PPSLSKMIQMAGEIADGMAYLNANKFVHRDLAARNCMVAEDFTVKIGDF | |
| GMTRDIYETDYYRKGGKGLLPVRWMSPESLKDGVF | |
| NKCGRRNKFGINRPAVLAPEDGLAMSLHFMTLGGSSLSPTEGKGSGLQ | SEQ ID No 782 |
| GHIIENPQYFSDACVHHIKRRDIVLKWELGEGAFGKVFLAECHNLLPEQD | |
| KMLVAVKALKEASESARQDFQREAELLTMLQHQHIVRFFGVCTEGRPLL | |
| MVFEYMRHGDLNRFLRSHGPDAKLLAGGEDVAPGPLGLGQLLAVASQV | |
| AAGMVYLAGLHFVHRDLATRNCLVGQGLVVKIGDFGMSRDIYS | |
| KLARHSKFGMKGPASVISNDDDSASPLHHISNGSNTPSSSEGGPDAVIIG | SEQ ID No 783 |
| MTKIPVIENPQYFGITNSQLKPDTFVQHIKRHNIVLKRELGEGAFGKVFLA | |
| ECYNLCPEQDKILVAVKTLKDASDNARKDFHREAELLTNLQHEHIVKFYG | |
| VCVEGDPLIMVFEYMKHGDLNKFLRAHGPDAVLMAEGNPPTELTQSQM | |
| LHIAQQIAAGMVYLASQHFVHRDLATRNCLVGENLLVKIGDFGMSRDVYS | |
| NCVSCCKDPEIDFKEFEDNFDDEIDFTPPAEDTPSVQSPAEVFTLSVPNI | SEQ ID No 784 |
| SLPAPSQFQPSVEGLKSQVARHSLNYIQEIGNGWFGKVLLGEIYTGTSVA | |
| RVIVKELKASANPKEQDTFLKNGEPYYILQHPNILQCVGQCVEAIPYLLVF | |
| EFCDLGDLKAYLRSEQEHMRGDSQTMLLQRMACEVAAGLAAMHKLHFL | |
| HSDLALRNCFLTSDLNVKVGDYGIGFSRYKEDYIETDDKKVFPLRWTAPE | |
| LVTSFQDRLLTADQ | |
| YKRKTQDADRTLKRLQLQMDNLESRVALECKEAFAELQTDINELTNHMD | SEQ ID No 785 |
| EVQIPFLDYRTYAVRVLFPGIEAHPVLKELDTPPNVEKALRLFGQLLHSRA | |
| FVLTFIHTLEAQSSFSMRDRGTVASLTMVALQSRLDYATGLLKQLLADLIE | |
| KNLESKNHPKLLLRRTESVAEKMLTNWFTFLLHKFLKECAGEPLFLLYCA | |
| IKQQMEKGPIDAITGEARYSLSEDKLIRQQIDYKTLTLHCVCPENEGSAQV | |
| PVKVLNCDSITQAKDKLLD | |
| KRKGRCSVPAFCSSQAEAPADTPEPTAGHTLYSVLSQGYEKLDTPLRPA | SEQ ID No 786 |
| RQQPTPTSDSSSDSNLTTEEDEDRPEVHKPISGRYEVFDQVTQEGAGH | |
| DPAPEGQADYDPVTPYVTEVESVVGENTMYAQVFNLQGKTPVSQKEES | |
| SA | |
| KRVQETKFGNAFTEEDSELVVNYIAKKSFCRRAIELTLHSLGVSEELQNK | SEQ ID No 787 |
| LEDVVIDRNLLILGKILGEGEFGSVMEGNLKQEDGTSLKVAVKTMKLDNS | |
| SQREIEEFLSEAACMKDFSHPNVIRLLGVCIEMSSQGIPKPMVILPFMKY | |
| GDLHTYLLYSRLETGPKHIPLQTLLKFMVDIALGMEYLSNRNFLHRDLAA | |
| RNCMLRDDMTVCVADFGLSKKIYSGDYYRQGRIAKMPVKWIAIESLADR | |
| VYTSKSDVWAFGVTMWEIATRGM | |
| SRQQRRREARGRGDASGLKRNSERKTPEGRASPAPGSGHPEGPGAHL | SEQ ID No 788 |
| DMNSLDRAQAAKNKGNKYFKAGKYEQAIQCYTEAISLCPTEKNVDLSTF | |
| YQNRAAAFEQLQKWKEVAQDCTKAVELNPKYVKALFRRAKAHEKLDNK | |
| KECLEDVTAVCILEGFQNQQSMLLADKVLKLLGKEKAKEKYKNREPLMP | |
| SPQFIKSYFSSFTDDIISQPMLKGEKSDEDKDKEGEALEVKENSGYLKAK | |
| QYMEEENYDKIISECSKEIDAEGKYMAEALLLRA | |
| LRKRRKETRFGQAFDSVMARGEPAVHFRAARSFNRERPERIEATLDSLG | SEQ ID No 789 |
| ISDELKEKLEDVLIPEQQFTLGRMLGKGEFGSVREAQLKQEDGSFVKVA | |
| VKMLKADIIASSDIEEFLREAACMKEFDHPHVAKLVGVSLRSRAKGRLPIP | |
| MVILPFMKHGDLHAFLLASRIGENPFNLPLQTLIRFMVDIACGMEYLSSRN | |
| FIHRDLAARNCMLAEDMTVCVADFGLSRKIYSGDYYRQGCASKLPVKWL | |
| ALESLADNLYTVQSDVWAFGVTMWEIMTRGQ | |
| HRRKKETRYGEVFEPTVERGELVVRYRVRKSYSRRTTEATLNSLGISEE | SEQ ID No 790 |
| LKEKLRDVMVDRHKVALGKTLGEGEFGAVMEGQLNQDDSILKVAVKTM | |
| KIAICTRSELEDFLSEAVCMKEFDHPNVMRLIGVCFQGSERESFPAPVVIL | |
| PFMKHGDLHSFLLYSRLGDQPVYLPTQMLVKFMADIASGMEYLSTKRFI | |
| HRDLAARNCMLNENMSVCVADFGLSKKIYNGDYYRQGRIAKMPVKWIAI | |
| ESLADRVYTSKSDVWSFGVTMWEIATRGQ | |
| KRIELDDSISASSSSQGLSQPSTQTTQYLRADTPNNATPITSYPTLRIEKN | SEQ ID No 791 |
| DLRSVTLLEAKGKVKDIAISRERITLKDVLQEGTFGRIFHGILIDEKDPNKE | |
| KQAFVKTVKDQASEIQVTMMLTESCKLRGLHHRNLLPITHVCIEEGEKPM | |
| VILPYMNWGNLKLFLRQCKLVEANNPQAISQQDLVHMAIQIACGMSYLA | |
| RREVIHKDLAARNCVIDDTLQVKITDNALSRDLFPMDYHCLGDNENRPVR | |
| WMALESLVNNEFSSASDVWAFGVTLWELMTLGQ | |
| NCRTWWQVLDSLLNSQRKRLHNAASKLHKLKSEGFMKVLKCEVELMAR | SEQ ID No 792 |
| MAKTIDSFTQNQTRLVVIIDGLDACEQDKVLQMLDTVRVLFSKGPFIAIFA | |
| SDPHIIIKAINQNLNSVLRDSNINGHDYMRNIVHLPVFLNSRGLSNARKFL | |
| VTSATNGDVPCSDTTGIQEDADRRVSQNSLGEMTKLGSKTALNRRDTY | |
| RRRQMQRTITRQMSFDLTKLLVTEDWFSDISPQTMRRLLNIVSVTGRLLR | |
| ANQISFNWDRLASWINLTEQWPYRTSWLILYLEETEGIPDQMTLK | |
| MFNYTFQQVQEHTDQIWKFQRHDLIEEYHGRPAAPPPFILLSHLQLFIKR | SEQ ID No 793 |
| VVLKTPAKRHKQLKNKLEKNEEAALLSWEIYLKENYLQNRQFQQKQRPE | |
| QKIEDISNKVDAMVDLLDLDPLKRSGSMEQRLASLEEQVAQTAQALHWI | |
| VRTLRASGFSSEADVPTLASQKAAEEPDAEPGGRKKTEEPGDSYHVNA | |
| RHLLYPNCPVTRFPVPNEKVPWETEFLIYDPPFYTAERKDAAAMDPMGD | |
| TLEPLSTIQYNVVDGLRDRRSFHGPYTVQAGLPLNPMGRTGLRGRGSLS | |
| CFGPNH | |
| AYKRKSRESDLTLKRLQMQMDNLESRVALECKEAFAELQTDIHELTSDL | SEQ ID No 794 |
| DGAGIPFLDYRTYTMRVLFPGIEDHPVLRDLEVPGYRQERVEKGLKLFA | |
| QLINNKVFLLSFIRTLESQRSFSMRDRGNVASLIMTVLQSKLEYATDVLKQ | |
| LLADLIDKNLESKNHPKLLLRRTESVAEKMLTNWFTFLLYKFLKECAGEPL | |
| FSLFCAIKQQMEKGPIDAITGEARYSLSEDKLIRQQIDYKTLVLSCVSPDN | |
| ANSPEVPVKILNCDTITQVKEKILDAIFKNVPCSHRPKAADMDLEWRQGS | |
| GARMILQDEDITTKIENDWKRLNTLAHYQVPDGSVVALVSKQV | |
| RWHCPRRLLGACWTLNGQEEPVSQPTPQLENEVSRQHLPATLPEMVA | SEQ ID No 795 |
| FYQELHTPTQGQTMVRQLMHKLLVFSAREVDHRGGCLMLQDTGISLLIP | |
| PGAVAVGRQERVSLILVWDLSDAPSLSQAQGLVSPVVACGPHGASFLK | |
| PCTLTFKHCAEQPSHARTYSSNTTLLDAKVWRPLGRPGAHASRDECRIH | |
| LSHFSLYTCVLEAPVGREARKWLQLAVFCSPLVPGQSHLQLRIYFLNNTP | |
| CALQWALTNEQPHGGRLRGPCQLFDFNGARGDQCLKLTYISEGWENV | |
| DDSSCQLVPHLHIWHGKCPFRSFCFRRKAADENEDCSALTNEIIVTMHT | |
| FQDGLE | |
| KQKPRYEIRWRVIESISPDGHEYIYVDPMQLPYDSRWEFPRDGLVLGRV | SEQ ID No 796 |
| LGSGAFGKVVEGTAYGLSRSQPVMKVAVKMLKPTARSSEKQALMSELKI | |
| MTHLGPHLNIVNLLGACTKSGPIYIITEYCFYGDLVNYLHKNRDSFLSHHP | |
| EKPKKELDIFGLNPADESTRSYVILSFENNGDYMDMKQADTTQYVPMLE | |
| RKEVSKYSDIQRSLYDRPASYKKKSMLDSEVKNLLSDDNSEGLTLLDLLS | |
| FTYQVARGMEFLASKNCVHRDLAARNVLLAQGKIVKICDFGLARDIMHD | |
| SNYVSKGSTFLPVKWMAPESIFDNLYTTLSDVWSYGILLWEIFSLGGTPY | |
| PGMMVDS | |
| CCCKQRQPEGLGTRFAPVPEGGEGVMQSWRIEGAHPEDRDVSNICAP | SEQ ID No 797 |
| MTASNTQDRMDSSEIYTNTYAAGGTVEGGVSGVELNTGMGTAVGLMAA | |
| GAAGASGAARKRSSTMGTLRDYADADINMAFLDSYFSEKAYAYADEDE | |
| GRPANDCLLIYDHEGVGSPVGSIGCCSWIVDDLDESCMETLDPKFRTLA | |
| EICLNTEIEPFPSHQACIPISTDLPLLGPNYFVNESSGLTPSEVEFQEEMA | |
| ASEPVVHGDIIVTETYGNADPCVQPTTIIFDPQLAPNVVVTEAVMAPVYDI | |
| QGNICVPAELADYNNVIYAERVLASPGVPDMSNSSTTEGCMGPVMSGNI | |
| LVGPEIQVMQMMSPDLPIGQTVGSTSPMTSRHRV | |
| SNKCDVVVVGGGISGMAAAKLLHDSGLNVVVLEARDRVGGRTYTLRNQ | SEQ ID No 798 |
| KVKYVDLGGSYVGPTQNRILRLAKELGLETYKVNEVERLIHHVKGKSYPF | |
| RGPFPPVWNPITYLDHNNFWRTMDDMGREIPSDAPWKAPLAEEWDNM | |
| TMKELLDKLCWTESAKQLATLFVNLCVTAETHEVSALWFLWYVKQCGG | |
| TTRIISTTNGGQERKFVGGSGQVSERIMDLLGDRVKLERPVIYIDQTREN | |
| VLVETLNHEMYEAKYVISAIPPTLGMKIHFNPPLPMMRNQMITRVPLGSVI | |
| KCIVYYKEPFWRKKDYCGTMIIDGEEAPVAYTLDDTKPEGNYAAIMGFIL | |
| AHKARKLARLTKEERLKKLCELYAKVLGSLEALEPVHYEEKNWCEEQYS | |
| GGCYTTYFPPGIL | |
| MENQEKASIAGHMFDVVVIGGGISGLSAAKLLTEYGVSVLVLEARDRVG | SEQ ID No 799 |
| GRTYTIRNEHVDYVDVGGAYVGPTQNRILRLSKELGIETYKVNVSERLVQ | |
| YVKGKTYPFRGAFPPVWNPIAYLDYNNLWRTIDNMGKEIPTDAPWEAQH | |
| ADKWDKMTMKELIDKICWTKTARRFAYLFVNINVTSEPHEVSALWFLWY | |
| VKQCGGTTRIFSVTNGGQERKFVGGSGQVSERIMDLLGDQVKLNHPVT | |
| HVDQSSDNIIIETLNHEHYECKYVINAIPPTLTAKIHFRPELPAERNQLIQRL | |
| PMGAVIKCMMYYKEAFWKKKDYCGCMIIEDEDAPISITLDDTKPDGSLPA | |
| IMGFILARKADRLAKLHKEIRKKKICELYAKVLGSQEALHPVHYEEKNWC | |
| EEQYSGGCYTAYFPPGIM | |
| CCDCGGAPRSAAGFEPVPECSDGAIHSWAVEGPQPEPRDITTVIPQIPP | SEQ ID No 800 |
| DNANIIECIDNSGVYTNEYGGREMQDLGGGERMTGFELTEGVKTSGMP | |
| EICQEYSGTLRRNSMRECREGGLNMNFMESYFCQKAYAYADEDEGRP | |
| SNDCLLIYDIEGVGSPAGSVGCCSFIGEDLDDSFLDTLGPKFKKLADISLG | |
| KESYPDLDPSWPPQSTEPVCLPQETEPVVSGHPPISPHFGTTTVISESTY | |
| PSGPGVLHPKPILDPLGYGNVTVTESYTTSDTLKPSVHVHDNRPASNVV | |
| VTERVVGPISGADLHGMLEMPDLRDGSNVIVTERVIAPSSSLPTSLTIHHP | |
| RESSNVVVTERVIQPTSGMIGSLSMHPELANAHNVIVTERVVSGAGVTGI | |
| SGTTGISGGIGSSGLVGTSMGAGSGALSGAGISGGGIGLSSLGGTASIG | |
| HMRSSSDHHFNQTIGSASPSTARSRI | |
| NLEGVMNQADAPRPLNWTIRKLCHAAFLPSVRLLKAQKSWIERAFYKRE | SEQ ID No 801 |
| CVHIIPSTKDPHRCCCGRLIGQHVGLTPSISVLQNEKNESRLSRNDIQSE | |
| KWSISKHTQLSPTDAFGTIEFQGGGHSNKAMYVRVSFDTKPDLLLHLMT | |
| KEWQLELPKLLISVHGGLQNFELQPKLKQVFGKGLIKAAMTTGAWIFTGG | |
| VNTGVIRHVGDALKDHASKSRGKICTIGIAPWGIVENQEDLIGRDVVRPY | |
| QTMSNPMSKLTVLNSMHSHFILADNGTTGKYGAEVKLRRQLEKHISLQKI | |
| NTRCLPFFSLDSRLFYSFWGSCQLDSVGIGQGVPVVALIVEGGPNVISIV | |
| LEYLRDTPPVPVVVCDGSGRASDILAFGHKYSEEGGLINESLRDQLLVTI | |
| QKTFTYTRTQAQHLFIILMECMKKKELITVFRMGSEGHQDIDLAILTALLK | |
| GANASAPDQLSLALAWNRVDIARSQIFIYGQQWPVGSLEQAMLDALVLD | |
| RVDFVKLLIENGVSMHRFLTISRLEELYNTRHGPSN | |
| ELFANKRKYTSSYEALKGKKFIVVCGNITVDSVTAFLRNFLRDKSGEINTE | SEQ ID No 802 |
| IVFLGETPPSLELETIFKCYLAYTTFISGSAMKWEDLRRVAVESAEACLIIA | |
| NPLCSDSHAEDISNIMRVLSIKNYDSTTRIIIQILQSHNKVYLPKIPSWNWD | |
| TGDNIICFAELKLGFIAQGCLVPGLCTFLTSLFVEQNKKVMPKQTWKKHF | |
| LNSMKNKILTQRLSDDFAGMSFPEVARLCFLKMHLLLIAIEYKSLFTDGFC | |
| GLILNPPPQVRIRKNTLGFFIAETPKDVRRALFYCSVCHDDVFIPELITNCG | |
| CKSRSRQHITVPSVKRMKKCLKGISSRISGQDSPPRVSASTSSISNFTTR | |
| TLQHDVEQDSDQLDSSGMFHWCKPTSLDKVTLKRTGKSKYKFRNHIVA | |
| CVFGDAHSAPMGLRNFVMPLRASNYTRKELKDIVFIGSLDYLQREWRFL | |
| WNFPQIYILPGCALYSGDLHAANIEQCSMCAVLSPPPQPSSNQTLVDTE | |
| AIMATLTIGSLQIDSSSDPSPSVSEETPGYTNGHNEKSNCRKVPILTELKN | |
| PSNIHFIEQLGGLEGSLQETNLHLSTAFSTGTVFSGSFLDSLLATAFYNYH | |
| VLELLQMLVTGGVSSQLEQHLDKDKVYGVADSCTSLLSGRNRCKLGLLS | |
| LHETILSDVNPRNTFGQLFCGSLDLFGILCVGLYRIIDEEELNPENKRFVIT | |
| RPANEFKLLPSDLVFCAIPFSTACYKRNEEFSLQKSYEIVNKASQTTETH | |
| SDTNCPPTIDSVTE | |
| QFEELVYLWMERQKSGGNYSRHRAQTEKHVVLCVSSLKIDLLMDFLNEF | SEQ ID No 803 |
| YAHPRLQDYYVVILCPTEMDVQVRRVLQIPLWSQRVIYLQGSALKDQDL | |
| MRAKMDNGEACFILSSRNEVDRTAADHQTILRAWAVKDFAPNCPLYVQI | |
| LKPENKFHVKFADHVVCEEECKYAMLALNCICPATSTLITLLVHTSRGQE | |
| GQESPEQWQRMYGRCSGNEVYHIRMGDSKFFREYEGKSFTYAAFHAH | |
| KKYGVCLIGLKREDNKSILLNPGPRHILAASDTCFYINITKEENSAFIFKQE | |
| EKRKKRAFSGQGLHEGPARLPVHSIIASMGTVAMDLQGTEHRPTQSGG | |
| GGGGSKLALPTENGSGSRRPSIAPVLELADSSALLPCDLLSDQSEDEVT | |
| PSDDEGLSVVEYVKGYPPNSPYIGSSPTLCHLLPVKAPFCCLRLDKGCK | |
| HNSYEDAKAYGFKNKLIIVSAETAGNGLYNFIVPLRAYYRSRKELNPIVLL | |
| LDNKPDHHFLEAICCFPMVYYMEGSVDNLDSLLQCGIIYADNLVVVDKES | |
| TMSAEEDYMADAKTIVNVQTMFRLFPSLSITTELTHPSNMRFMQFRAKD | |
| SYSLALSKLEKRERENGSNLAFMFRLPFAAGRVFSISMLDTLLYQSFVKD | |
| YMITITRLLLGLDTTPGSGYLCAMKITEGDLWIRTYGRLFQKLCSSSAEIPI | |
| GIYRTESHVFSTSESQISVNVEDCEDTREVKGPWGSRAGTGGSSQGRH | |
| TGGGDPAEHPLLRRKSLQWARRLSRKAPKQAGRAAAAEWISQQRLSLY | |
| RRSERQELSELVKNRMKHLGLPT | |
| MSGGASATGPRRGPPGLEDTTSKKKQKDRANQESKDGDPRKETGSRY | SEQ ID No 804 |
| VAQAGLEPLASGDPSASASHAAGITGSRHRTRLFFPSSSGSASTPQEEQ | |
| TKEGACEDPHDLLATPTPELLLDWRQSAEEVIVKLRVGVGPLQLEDVDA | |
| AFTDTDCVVRFAGGQQWGGVFYAEIKSSCAKVQTRKGSLLHLTLPKKVP | |
| MLTWPSLLVEADEQLCIPPLNSQTCLLGSEENLAPLAGEKAVPPGNDPV | |
| SPAMVRSRNPGKDDCAKEEMAVAADAATLVDEPESMVNLAFVKNDSYE | |
| KGPDSVVVHVYVKEICRDTSRVLFREQDFTLIFQTRDGNFLRLHPGCGP | |
| HTTFRWQVKLRNLIEPEQCTFCFTASRIDICLRKRQSQRWGGLEAPAAR | |
| VGGAKVAVPTGPTPLDSTPPGGAPHPLTGQEEARAVEKDKSKARSEDT | |
| GLDSVATRTPMEHVTPKPETHLASPKPTCMVPPMPHSPVSGDSVEEEE | |
| EEEKKVCLPGFTGLVNLGNTCFMNSVIQSLSNTRELRDFFHDRSFEAEIN | |
| YNNPLGTGGRLAIGFAVLLRALWKGTHHAFQPSKLKAIVASKASQFTGY | |
| AQHDAQEFMAFLLDGLHEDLNRIQNKPYTETVDSDGRPDEVVAEEAWQ | |
| RHKMRNDSFIVDLFQGQYKSKLVCPVCAKVSITFDPFLYLPVPLPQKQKV | |
| LPVFYFAREPHSKPIKFLVSVSKENSTASEVLDSLSQSVHVKPENLRLAE | |
| VIKNRFHRVFLPSHSLDTVSPSDTLLCFELLSSELAKERVVVLEVQQRPQ | |
| VPSVPISKCAACQRKQQSEDEKLKRCTRCYRVGYCNQLCQKTHWPDH | |
| KGLCRPENIGYPFLVSVPASRLTYARLAQLLEGYARYSVSVFQPPFQPG | |
| RMALESQSPGCTTLLSTGSLEAGDSERDPIQPPELQLVTPMAEGDTGLP | |
| RVWAAPDRGPVPSTSGISSEMLASGPIEVGSLPAGERVSRPEAAVPGY | |
| QHPSEAMNAHTPQFFIYKIDSSNREQRLEDKGDTPLELGDDCSLALVWR | |
| NNERLQEFVLVASKELECAEDPGSAGEAARAGHFTLDQCLNLFTRPEVL | |
| APEEAWYCPQCKQHREASKQLLLWRLPNVLIVQLKRFSFRSFIWRDKIN | |
| DLVEFPVRNLDLSKFCIGQKEEQLPSYDLYAVINHYGGMIGGHYTACARL | |
| PNDRSSQRSDVGWRLFDDSTVTTVDESQVV | |
| MADGGEGEDEIQFLRTDDEVVLQCTATIHKEQQKLCLAAEGFGNRLCFL | SEQ ID No 805 |
| ESTSNSKNVPPDLSICTFVLEQSLSVRALQEMLANTVEKSEGQVDVEKW | |
| KFMMKTAQGGGHRTLLYGHAILLRHSYSGMYLCCLSTSRSSTDKLAFDV | |
| GLQEDTTGEACWWTIHPASKQRSEGEKVRVGDDLILVSVSSERYLHLSY | |
| GNGSLHVDAAFQQTLWSVAPISSGSEAAQGYLIGGDVLRLLHGHMDEC | |
| LTVPSGEHGEEQRRTVHYEGGAVSVHARSLWRLETLRVAWSGSHIRW | |
| GQPFRLRHVTTGKYLSLMEDKNLLLMDKEKADVKSTAFTFRSSKEKLDV | |
| GVRKEVDGMGTSEIKYGDSVCYIQHVDTGLWLTYQSVDVKSVRMGSIQ | |
| RKAIMHHEGHMDDGISLSRSQHEESRTARVIRSTVFLFNRFIRGLDALSK | |
| KAKASTVDLPIESVSLSLQDLIGYFHPPDEHLEHEDKQNRLRALKNRQNL | |
| FQEEGMINLVLECIDRLHVYSSAAHFADVAGREAGESWKSILNSLYELLA | |
| ALIRGNRKNCAQFSGSLDWLISRLERLEASSGILEVLHCVLVESPEALNIIK | |
| EGHIKSIISLLDKHGRNHKVLDVLCSLCVCHGVAVRSNQHLICDNLLPGR | |
| DLLLQTRLVNHVSSMRPNIFLGVSEGSAQYKKWYYELMVDHTEPFVTAE | |
| ATHLRVGWASTEGYSPYPGGGEEWGGNGVGDDLFSYGFDGLHLWSG | |
| CIARTVSSPNQHLLRTDDVISCCLDLSAPSISFRINGQPVQGMFENFNIDG | |
| LFFPVVSFSAGIKVRFLLGGRHGEFKFLPPPGYAPCYEAVLPKEKLKVEH | |
| SREYKQERTYTRDLLGPTVSLTQAAFTPIPVDTSQIVLPPHLERIREKLAE | |
| NIHELWVMNKIELGWQYGPVRDDNKRQHPCLVEFSKLPEQERNYNLQM | |
| SLETLKTLLALGCHVGISDEHAEDKVKKMKLPKNYQLTSGYKPAPMDLSF | |
| IKLTPSQEAMVDKLAENAHNVWARDRIRQGWTYGIQQDVKNRRNPRLV | |
| PYTLLDDRTKKSNKDSLREAVRTLLGYGYNLEAPDQDHAARAEVCSGT | |
| GERFRIFRAEKTYAVKAGRWYFEFETVTAGDMRVGWSRPGCQPDQEL | |
| GSDERAFAFDGFKAQRWHQGNEHYGRSWQAGDVVGCMVDMNEHTM | |
| MFTLNGEILLDDSGSELAFKDFDVGDGFIPVCSLGVAQVGRMNFGKDVS | |
| TLKYFTICGLQEGYEPFAVNTNRDITMWLSKRLPQFLQVPSNHEHIEVTRI | |
| DGTIDSSPCLKVTQKSFGSQNSNTDIMFYRLSMPIECAEVFSKTVAGGLP | |
| GAGLFGPKNDLEDYDADSDFEVLMKTAHGHLVPDRVDKDKEATKPEFN | |
| NHKDYAQEKPSRLKQRFLLRRTKPDYSTSHSARLTEDVLADDRDDYDFL | |
| MQTS | |

TABLE 7
Naturally occurring C-terminal flanking regions of
ITIM.*ITSM intracellular domains varying in length from 1-2890
(Table 7 comprises SEQ ID No 806 to SEQ ID No 836)

| | |
|---|---|
| V | |
| SRP | |
| RTQ | |
| KIHK | SEQ ID No 806 |
| KTSK | SEQ ID No 807 |
| KIHR | SEQ ID No 808 |
| CVRS | SEQ ID No 809 |
| QYSK | SEQ ID No 810 |
| LFEENKL | SEQ ID No 811 |
| KAENIIMMETAQTSL | SEQ ID No 812 |
| YVISEEKDECVIATEV | SEQ ID No 813 |
| NHSKESKPTFSRATALDNV | SEQ ID No 814 |
| RKAVPDAVESRYSRTEGSLDGT | SEQ ID No 815 |
| KIHTGQPLRGPGFGLQLEREMSGMVPK | SEQ ID No 816 |
| VFPSGMGTSSPARRGSADGPRSAQPLRPEDGHCSWPL | SEQ ID No 817 |
| QTSPQPASEDTLTYADLDMVHLNRTPKQPAPKPEPSFSEYASVQVPRK | SEQ ID No 818 |
| YSYQPRTNSLSFPKQIAWNQSRTNSIISSQIPLGDNAKENERKTSDEVYD | SEQ ID No 819 |
| EDPFAYSEPL | |
| MKRLIKRYVLKAQVDKENDEVNEGELKEIKQDISSLRYELLEDKSQATEE | SEQ ID No 820 |
| LAILIHKLSEKLNPSMLRCE | |
| IRQPVGRIFFAGTETATKWSGYMEGAVEAGERAAREVLNGLGKVTEKDI | SEQ ID No 821 |
| WVQEPESKDVPAVEITHTFWERNLPS | |
| LRQPVDRIYFAGTETATHWSGYMEGAVEAGERAAREILHAMGKIPEDEI | SEQ ID No 822 |
| WQSEPESVDVPAQPITTTFLERHLPSV | |
| MKRLIKRYVLKAQVDRENDEVNEGELKEIKQDISSLRYELLEEKSQATGE | SEQ ID No 823 |
| LADLIQQLSEKFGKNLNKDHLRVNKGKDI | |
| LFYRRRNSPVERPPRAGHSEHHPDLGPAAEAAASQASRIWQELEAEEE | SEQ ID No 824 |
| PVPEGSGPLGPWGPQDWVGPLPRGPTTPDEGCLRY | |
| LRFQASEEESWAAPPPVSQPPPCNRLPPELFEQLRMLLEPNSITGNDW | SEQ ID No 825 |
| RRLASHLGLCGMKIRFLSCQRSPAAAILELFEEQNGSLQELHYLMTVME | |
| RLDCASAIQNYLSGTHGGSPGPERGGARDNQGLELDEKL | |
| ENSEIYDYLRQGNRLKQPADCLDGLYALMSRCWELNPQDRPSFTELRE | SEQ ID No 826 |
| DLENTLKALPPAQEPDEILYVNMDEGGGYPEPPGAAGGADPPTQPDPK | |
| DSCSCLTAAEVHPAGRYVLCPSTTPSPAQPADRGSPAAPGQEDGA | |
| TRWRRNEDGAICRKSIKKMLEVLVVKLPLSEHWALPGGSREPGEMLPR | SEQ ID No 827 |
| KLKRILRQEHWPSFENLLKCGMEVYKGYMDDPRNTDNAWIETVAVSVH | |
| FQDQNDVELNRLNSNLHACDSGASIRWQVVDRRIPLYANHKTLLQKAAA | |
| EFGAHY | |
| WSFGVVLWEIATLAEQPYQGLSNEQVLRFVMEGGLLDKPDNCPDMLFE | SEQ ID No 828 |
| LMRMCWQYNPKMRPSFLEIISSIKEEMEPGFREVSFYYSEENKLPEPEE | |
| LDLEPENMESVPLDPSASSSSLPLPDRHSGHKAENGPGPGVLVLRASFD | |
| ERQPYAHMNGGRKNERALPLPQSSTC | |
| KSGYRMAKPDHATSEVYEIMVKCWNSEPEKRPSFYHLSEIVENLLPGQY | SEQ ID No 829 |
| KKSYEKIHLDFLKSDHPAVARMRVDSDNAYIGVTYKNEEDKLKDWEGGL | |
| DEQRLSADSGYIIPLPDIDPVPEEEDLGKRNRHSSQTSEESAIETGSSSS | |
| TFIKREDETIEDIDMMDDIGIDSSDLVEDSFL | |
| QNHEMYDYLLHGHRLKQPEDCLDELYEIMYSCWRTDPLDRPTFSVLRL | SEQ ID No 830 |
| QLEKLLESLPDVRNQADVIYVNTQLLESSEGLAQGSTLAPLDLNIDPDSII | |
| ASCTPRAAISVVTAEVHDSKPHEGRYILNGGSEEWEDLTSAPSAAVTAE | |
| KNSVLPGERLVRNGVSWSHSSMLPLGSSLPDELLFADDSSEGSEVLM | |
| CETLQFLDCICGSTTGGLGLLGLYINEKNVALINQTLESLTEYCQGPCHE | SEQ ID No 831 |
| NQNCIATHESNGIDIITALILNDINPLGKKRMDLVLELKNNASKLLLAIMESR | |
| HDSENAERILYNMRPKELVEVIKKAYMQGEVEFEDGENGEDGAASPRN | |
| VGHNIYILAHQLARHNKELQSMLKPGGQVDGDEALEFYAKHTAQIEIVRL | |
| DRTMEQIVFPVPSICEFLTKESKLRIYYTTERDEQGSKINDFFLRSEDLFN | |
| EMNWQKKLRAQPVLYWCARNMS | |
| CETLQFLDCICGSTTGGLGLLGLYINEKNVALVNQNLESLTEYCQGPCHE | SEQ ID No 832 |
| NQTCIATHESNGIDIIIALILNDINPLGKYRMDLVLQLKNNASKLLLAIMESR | |
| HDSENAERILFNMRPRELVDVMKNAYNQGLECDHGDDEGGDDGVSPK | |
| DVGHNIYILAHQLARHNKLLQQMLKPGSDPDEGDEALKYYANHTAQIEIV | |
| RHDRTMEQIVFPVPNICEYLTRESKCRVFNTTERDEQGSKVNDFFQQTE | |
| DLYNEMKWQKKIRNNPALFWFSRHIS | |
| NNSTVSRTSASKYENMIRYTGSPDSLRSRTPMITPDLESGVKMWHLVKN | SEQ ID No 833 |
| HEHGDQKEGDRGSKMVSEIYLTRLLATKGTLQKFVDDLFETIFSTAHRG | |
| SALPLAIKYMFDFLDEQADKHGIHDPHVRHTWKSNCLPLRFWVNMIKNP | |
| QFVFDIHKNSITDACLSVVAQTFMDSCSTSEHRLGKDSPSNKLLYAKDIP | |
| SYKNWVERYYSDIGKMPAISDQDMNAYLAEQSRMHMNEFNTMSALSEI | |
| FSYVGKYSEEILGPLDHDDQCGKQKLAYKLEQVITLMSLDS | |
| CETLQFLDIMCGSTTGGLGLLGLYINEDNVGLVIQTLETLTEYCQGPCHE | SEQ ID No 834 |
| NQTCIVTHESNGIDIITALILNDISPLCKYRMDLVLQLKDNASKLLLALMES | |
| RHDSENAERILISLRPQELVDVIKKAYLQEEERENSEVSPREVGHNIYILA | |
| LQLSRHNKQLQHLLKPVKRIQEEEAEGISSMLSLNNKQLSQMLKSSAPA | |
| QEEEEDPLAYYENHTSQIEIVRQDRSMEQIVFPVPGICQFLTEETKHRLF | |
| TTTEQDEQGSKVSDFFDQSSFLHNEMEWQRKLRSMPLIYWFSRRMT | |
| PYSQRPKAEDMDLEWRQGRMTRIILQDEDVTTKIECDWKRLNSLAHYQ | SEQ ID No 835 |
| VTDGSLVALVPKQVSAYNMANSFTFTRSLSRYESLLRTASSPDSLRSRA | |
| PMITPDQETGTKLWHLVKNHDHADHREGDRGSKMVSEIYLTRLLATKGT | |
| LQKFVDDLFETVFSTAHRGSALPLAIKYMFDFLDEQADQRQISDPDVRHT | |
| WKSNCLPLRFWVNVIKNPQFVFDIHKNSITDACLSVVAQTFMDSCSTSE | |
| HRLGKDSPSNKLLYAKDIPNYKSWVERYYRDIAKMASISDQDMDAYLVE | |
| QSRLHASDFSVLSALNELYFYVTKYRQEILTALDRDASCRKHKLRQKLEQ | |
| IISLVSSDS | |
| DLSNKINEMKTFNSPNLKDGRFVNPSGQPTPYATTQLIQSNLSNNMNNG | SEQ ID No 836 |
| SGDSGEKHWKPLGQQKQEVAPVQYNIVEQNKLNKDYRANDTVPPTIPY | |
| NQSYDQNTGGSYNSSDRGSSTSGSQGHKKGARTPKVPKQGGMNWAD | |
| LLPPPPAHPPPHSNSEEYNISVDESYDQEMPCPVPPARMYLQQDELEEE | |
| EDERGPTPPVRGAASSPAAVSYSHQSTATLTPSPQEELQPMLQDCPEE | |
| TGHMQHQPDRRRQPVSPPPPPRPISPPHTYGYISGPLVSDMDTDAPEE | |
| EEDEADMEVAKMQTRRLLLRGLEQTPASSVGDLESSVTGSMINGWGSA | |
| SEEDNISSGRSSVSSSDGSFFTDADFAQAVAAAAEYAGLKVARRQMQD | |
| AAGRRHFHASQCPRPTSPVSTDSNMSAAVMQKTRPAKKLKHQPGHLR | |
| RETYTDDLPPPPVPPPAIKSPTAQSKTQLEVRPVVVPKLPSMDARTDRS | |
| SDRKGSSYKGREVLDGRQVVDMRTNPGDPREAQEQQNDGKGRGNKA | |
| AKRDLPPAKTHLIQEDILPYCRPTFPTSNNPRDPSSSSSMSSRGSGSRQ | |
| REQANVGRRNIAEMQVLGGYERGEDNNEELEETES | |

TABLE 8
Examples of naturally occurring C-terminal flanking regions
of ITSM only intracellular domains that could vary in length from
1-2890 (Table 8 comprises SEQ ID No 837 to SEQ ID No 925)

| | |
|---|---|
| L | |
| V | |
| PR | |
| RIN | |
| RTQ | |
| SRP | |
| KIHK | SEQ ID No 837 |
| KTSK | SEQ ID No 838 |
| KIHR | SEQ ID No 839 |
| CVRS | SEQ ID No 840 |
| QYSK | SEQ ID No 841 |
| HYTQQ | SEQ ID No 842 |
| LGPKPQG | SEQ ID No 843 |
| LFEENKL | SEQ ID No 844 |
| VKADTYCA | SEQ ID No 845 |
| QTSEPSGT | SEQ ID No 846 |
| QSCALPTDAL | SEQ ID No 847 |
| AKNALLRWRV | SEQ ID No 848 |
| SKNRLLSIKT | SEQ ID No 849 |
| QHIPAQQQDHPE | SEQ ID No 850 |
| AHHRFYTKRLTFWT | SEQ ID No 851 |
| AHHRFYAKRMTLWT | SEQ ID No 852 |
| KHRHWYPFNFVIEQ | SEQ ID No 853 |
| AHHRFYAERLAGWPC | SEQ ID No 854 |
| KAENIIMMETAQTSL | SEQ ID No 855 |
| YVISEEKDECVIATEV | SEQ ID No 856 |
| RKAVPDAVESRYSRTEGSLDGT | SEQ ID No 857 |
| RKPQVVPPPQQNDLEIPESPTYENFT | SEQ ID No |
| | 2028 |
| GKSQPKAQNPARLSRKELENFDVYS | SEQ ID No |
| | 2029 |
| KIHTGQPLRGPGFGLQLEREMSGMVPK | SEQ ID No 858 |
| IYAGFDTKIMKNCGKIHLKRTKLDLLMNKL | SEQ ID No 859 |
| ASALKSHRTRGHGRGDCCGRSLGDSCCFSAK | SEQ ID No 860 |
| FTLVLEEIRQGFFTDEDTHLVKKFTLYVGDNWNKCD | SEQ ID No 861 |
| VFPSGMGTSSPARRGSADGPRSAQPLRPEDGHCSWPL | SEQ ID No 862 |
| PSEDFERTPQSPTLPPAKVAAPNLSRMGAIPVMIPAQSKDGSIV | SEQ ID No 863 |
| LPEDGGPYTNSILFDSDDNIKWVCQDMGLGDSQDFRDYMESLQDQM | SEQ ID No 864 |
| QTSPQPASEDTLTYADLDMVHLNRTPKQPAPKPEPSFSEYASVQVPRK | SEQ ID No 865 |
| SYHASGHSVAYKPGGFKASTGFGSNTKNKKIYDGGARTEDEVQSYPSK | SEQ ID No 866 |
| HDYV | |
| QVGPGAAARWDLCIDQAVVFIEDAIQYRSINHRVDASSMWLYRRYYSNV | SEQ ID No 867 |
| CQR | |
| EGPRKGHLEEEEEDGEEGAETLAHFCPMELRGPEPLGSRPRQPNLIPW | SEQ ID No 868 |
| AAAGRRAAP | |
| QKPGPLQKKLDSFPAQDPCTTIYVAATEPVPESVQETNSITVYASVTLPES | SEQ ID No 869 |
| YSYQPRTNSLSFPKQIAWNQSRTNSIISSQIPLGDNAKENERKTSDEVYD | SEQ ID No 870 |
| EDPFAYSEPL | |
| DPFEMAAYLKDGYRIAQPINCPDELFAVMACCWALDPEERPKFQQLVQ | SEQ ID No 871 |
| CLTEFHAALGAYV | |
| THSNRETEIWTPRENDTITIYSTINHSKESKPTFSRATALDNV | SEQ ID No 872 |
| MKRLIKRYVLKAQVDKENDEVNEGELKEIKQDISSLRYELLEDKSQATEE | SEQ ID No 873 |
| LAILIHKLSEKLNPSMLRCE | |
| PPSHHQLTLPDPSHHGLHSTPDSPAKPEKNGHAKDHPKIAKIFEIQTMPN | SEQ ID No 874 |
| GKTRTSLKTMSRRKLSQQKEKKATQ | |
| IRQPVGRIFFAGTETATKWSGYMEGAVEAGERAAREVLNGLGKVTEKDI | SEQ ID No 875 |
| WVQEPESKDVPAVEITHTFWERNLPS | |
| FNLQGKTPVSQKEESSATIYCSIRKPQVVPPPQQNDLEIPESPTYENFT | SEQ ID No 876 |
| LRQPVDRIYFAGTETATHWSGYMEGAVEAGERAAREILHAMGKIPEDEI | SEQ ID No 877 |
| WQSEPESVDVPAQPITTTFLERHLPSV | |
| PHTNRTILKEDPANTVYSTVEIPKKMENPHSLLTMPDTPRLFAYENVI | SEQ ID No 878 |
| MKRLIKRYVLKAQVDRENDEVNEGELKEIKQDISSLRYELLEEKSQATGE | SEQ ID No 879 |
| LADLIQQLSEKFGKNLNKDHLRVNKGKDI | |
| LFYRRRNSPVERPPRAGHSEHHPDLGPAAEAAASQASRIWQELEAEEE | SEQ ID No 880 |
| PVPEGSGPLGPWGPQDWVGPLPRGPTTPDEGCLRY | |
| ANLTASDVMNRVNLGYLQDEMNDHQNTLSYVLINPPPDTRLEPSDIVYLI | SEQ ID No 881 |
| RSDPLAHVASSSQSRKSSCSHKLSSCNPETRDETQL | |
| MASRNTQPAESRIYDEILQSKVLPSKEEPVNTVYSEVQFADKMGKASTQ | SEQ ID No 882 |
| DSKPPGTSSYEIVI | |
| ENVPPLRWKEFVRRLGLSDHEIDRLELQNGRCLREAQYSMLATWRRRT | SEQ ID No 883 |
| PRREATLELLGRVLRDMDLLGCLEDIEEALCGPAALPPAPSLLR | |
| LIGDFLRACFVRFCNYCWCWDLEYGYPSYTEFDISGNVLALIFNQGMIW | SEQ ID No 884 |
| MGSFFAPSLPGINILRLHTSMYFQCWAVMCCNVPEARVFKASRSNN | |
| ESTESQILVGIVQRAQLVQALQAEPPSRAPGHQQCLQDILARGCPTEPV | SEQ ID No 885 |
| TLTLFSETTLHQAQNLFKLLNLQSLFVTSRGRAVGCVSWVEMKKAISNLT | |
| NPPAPK | |
| AKTIKDVFHNHGIHATTIQPEFASVGSKSSVVPCELACRTQCALKQCCGT | SEQ ID No 886 |
| LPQAPSGKDAEKTPAVSISCLELSNNLEKKPRRTKAENIPAVVIEIKNMPN | |
| KQPESSL | |
| TPSSPLATLLQHENPSHFELVVFLSAMQEGTGEICQRRTSYLPSEIMLHH | SEQ ID No 887 |
| CFASLLTRGSKGEYQIKMENFDKTVPEFPTPLVSKSPNRTDLDIHINGQSI | |
| DNFQISETGLTE | |
| GGRTMLPIRWMPPESILYRKFTTESDVWSFGVVLWEIFTYGKQPWYQLS | SEQ ID No 888 |
| NTEAIDCITQGRELERPRACPPEVYAIMRGCWQREPQQRHSIKDVHARL | |
| QALAQAPPVYLDVLG | |
| GGHTMLPIRWMPPESIMYRKFTTESDVWSLGVVLWEIFTYGKQPWYQL | SEQ ID No 889 |
| SNNEVIECITQGRVLQRPRTCPQEVYELMLGCWQREPHMRKNIKGIHTL | |
| LQNLAKASPVYLDILG | |
| LNPPPSPATDPSLYNMDMFYSSNIPATARPYRPYIIRGMAPPTTPCSTDV | SEQ ID No 890 |
| CDSDYSASRWKASKYYLDLNSDSDPYPPPPTPHSQYLSAEDSCPPSPA | |
| TERSYFHLFPPPPSPCTDSS | |
| DHNSPFFHMAAETLLQQDFELVVFLDGTVESTSATCQVRTSYVPEEVLW | SEQ ID No 891 |
| GYRFAPIVSKTKEGKYRVDFHNFSKTVEVETPHCAMCLYNEKDVRARM | |
| KRGYDNPNFILSEVNETDDTKM | |
| DETSPLKDLPLRSGEGDFELVLILSGTVESTSATCQVRTSYLPEEILWGY | SEQ ID No 892 |
| EFTPAISLSASGKYIADFSLFDQVVKVASPSGLRDSTVRYGDPEKLKLEE | |
| SLREQAEKEGSALSVRISNV | |
| LRFQASEEESWAAPPPVSQPPPCNRLPPELFEQLRMLLEPNSITGNDW | SEQ ID No 893 |
| RRLASHLGLCGMKIRFLSCQRSPAAAILELFEEQNGSLQELHYLMTVME | |
| RLDCASAIQNYLSGTHGGSPGPERGGARDNQGLELDEKL | |
| TRWRRNEDGAICRKSIKKMLEVLVVKLPLSEHWALPGGSREPGEMLPR | SEQ ID No 894 |
| KLKRILRQEHWPSFENLLKCGMEVYKGYMDDPRNTDNAWIETVAVSVH | |
| FQDQNDVELNRLNSNLHACDSGASIRWQVVDRRIPLYANHKTLLQKAAA | |
| EFGAHY | |
| ENAEIYNYLIGGNRLKQPPECMEDVYDLMYQCWSADPKQRPSFTCLRM | SEQ ID No 895 |
| ELENILGQLSVLSASQDPLYINIERAEEPTAGGSLELPGRDQPYSGAGDG | |
| SGMGAVGGTPSDCRYILTPGGLAEQPGQAEHQPESPLNETQRLLLLQQ | |
| GLLPHSSC | |
| WSFGVVLWEIATLAEQPYQGLSNEQVLRFVMEGGLLDKPDNCPDMLFE | SEQ ID No 896 |
| LMRMCWQYNPKMRPSFLEIISSIKEEMEPGFREVSFYYSEENKLPEPEE | |
| LDLEPENMESVPLDPSASSSSLPLPDRHSGHKAENGPGPGVLVLRASFD | |
| ERQPYAHMNGGRKNERALPLPQSSTC | |
| KSGYRMAKPDHATSEVYEIMVKCWNSEPEKRPSFYHLSEIVENLLPGQY | SEQ ID No 897 |
| KKSYEKIHLDFLKSDHPAVARMRVDSDNAYIGVTYKNEEDKLKDWEGGL | |
| DEQRLSADSGYIIPLPDIDPVPEEEDLGKRNRHSSQTSEESAIETGSSSS | |
| TFIKREDETIEDIDMMDDIGIDSSDLVEDSFL | |
| QNHEMYDYLLHGHRLKQPEDCLDELYEIMYSCWRTDPLDRPTFSVLRL | SEQ ID No 898 |
| QLEKLLESLPDVRNQADVIYVNTQLLESSEGLAQGSTLAPLDLNIDPDSII | |
| ASCTPRAAISVVTAEVHDSKPHEGRYILNGGSEEWEDLTSAPSAAVTAE | |
| KNSVLPGERLVRNGVSWSHSSMLPLGSSLPDELLFADDSSEGSEVLM | |
| PDPYKSSILSLIKFKENPHLIIMNVSDCIPDAIEVVSKPEGTKIQFLGTRKSL | SEQ ID No 899 |
| TETELTKPNYLYLLPTEKNHSGPGPCICFENLTYNQAASDSGSCGHVPV | |
| SPKAPSMLGLMTSPENVLKALEKNYMNSLGEIPAGETSLNYVSQLASPM | |
| FGDKDSLPTNPVEAPHCSEYKMQMAVSLRLALPPPTENSSLSSITLLDP | |
| GEHYC | |
| PNPENCKALQFQKSVCEGSSALKTLEMNPCTPNNVEVLETRSAFPKIED | SEQ ID No 900 |
| TEIISPVAERPEDRSDAEPENHVVVSYCPPIIEEEIPNPAADEAGGTAQVI | |
| YIDVQSMYQPQAKPEEEQENDPVGGAGYKPQMHLPINSTVEDIAAEEDL | |
| DKTAGYRPQANVNTWNLVSPDSPRSIDSNSEIVSFGSPCSINSRQFLIPP | |
| KDEDSPKSNGGGWSFTNFFQNKPND | |
| RDVKKGNLPPDYRISLIDIGLVIEYLMGGAYRCNYTRKRFRTLYHNLFGP | SEQ ID No 901 |
| KRPKALKLLGMEDDIPLRRGRKTTKKREEEVDIDLDDPEINHFPFPFHEL | |
| MVWAVLMKRQKMALFFWQHGEEAMAKALVACKLCKAMAHEASENDM | |
| VDDISQELNHNSRDFGQLAVELLDQSYKQDEQLAMKLLTYELKNWSNAT | |
| CLQLAVAAKHRDFIAHTCSQMLLTDMWMGRLRMRK | |
| KDLKTRRNHEQEQTFPGGGSTIYSMIQSQSSAPTSQEPAYTLYSLIQPSR | SEQ ID No 902 |
| KSGSRKRNHSPSFNSTIYEVIGKSQPKAQNPARLSRKELENFDVYS | |
| GNANAAKPDLDKVISLKEANVKLRANALIKRGSMYMQQQQPLLSTQDFN | SEQ ID No 903 |
| MAADIDPQNADVYHHRGQLKILLDQVEEAVADFDECIRLRPESALAQAQ | |
| KCFALYRQAYTGNNSSQIQAAMKGFEEVIKKFPRCAEGYALYAQALTDQ | |
| QQFGKADEMYDKCIDLEPDNATTYVHKGLLQLQWKQDLDRGLELISKAI | |
| EIDNKCDFAYETMGTIEVQRGNMEKAIDMFNKAINLAKSEMEMAHLYSLC | |
| DAAHAQTEVAKKYGLKPPTL | |
| ENEAPWVTDKRPPPDWPSKGKIQFNNYQVRYRPELDLVLRGITCDIGSM | SEQ ID No 904 |
| EKIGVVGRTGAGKSSLTNCLFRILEAAGGQIIIDGVDIASIGLHDLREKLTII | |
| PQDPILFSGSLRMNLDPFNNYSDEEIWKALELAHLKSFVASLQLGLSHEV | |
| TEAGGNLSIGQRQLLCLGRALLRKSKILVLDEATAAVDLETDNLIQTTIQN | |
| EFAHCTVITIAHRLHTIMDSDKVMVLDNGKIIECGSPEELLQIPGPFYFMA | |
| KEAGIENVNSTKF | |
| CETLQFLDCICGSTTGGLGLLGLYINEKNVALINQTLESLTEYCQGPCHE | SEQ ID No 905 |
| NQNCIATHESNGIDIITALILNDINPLGKKRMDLVLELKNNASKLLLAIMESR | |
| HDSENAERILYNMRPKELVEVIKKAYMQGEVEFEDGENGEDGAASPRN | |
| VGHNIYILAHQLARHNKELQSMLKPGGQVDGDEALEFYAKHTAQIEIVRL | |
| DRTMEQIVFPVPSICEFLTKESKLRIYYTTERDEQGSKINDFFLRSEDLFN | |
| EMNWQKKLRAQPVLYWCARNMS | |
| CETLQFLDCICGSTTGGLGLLGLYINEKNVALVNQNLESLTEYCQGPCHE | SEQ ID No 906 |
| NQTCIATHESNGIDIIIALILNDINPLGKYRMDLVLQLKNNASKLLLAIMESR | |
| HDSENAERILFNMRPRELVDVMKNAYNQGLECDHGDDEGGDDGVSPK | |
| DVGHNIYILAHQLARHNKLLQQMLKPGSDPDEGDEALKYYANHTAQIEIV | |
| RHDRTMEQIVFPVPNICEYLTRESKCRVFNTTERDEQGSKVNDFFQQTE | |
| DLYNEMKWQKKIRNNPALFWFSRHIS | |
| NNSTVSRTSASKYENMIRYTGSPDSLRSRTPMITPDLESGVKMWHLVKN | SEQ ID No 907 |
| HEHGDQKEGDRGSKMVSEIYLTRLLATKGTLQKFVDDLFETIFSTAHRG | |
| SALPLAIKYMFDFLDEQADKHGIHDPHVRHTWKSNCLPLRFWVNMIKNP | |
| QFVFDIHKNSITDACLSWAQTFMDSCSTSEHRLGKDSPSNKLLYAKDIP | |
| SYKNWVERYYSDIGKMPAISDQDMNAYLAEQSRMHMNEFNTMSALSEI | |
| FSYVGKYSEEILGPLDHDDQCGKQKLAYKLEQVITLMSLDS | |
| CETLQFLDIMCGSTTGGLGLLGLYINEDNVGLVIQTLETLTEYCQGPCHE | SEQ ID No 908 |
| NQTCIVTHESNGIDIITALILNDISPLCKYRMDLVLQLKDNASKLLLALMES | |
| RHDSENAERILISLRPQELVDVIKKAYLQEEERENSEVSPREVGHNIYILA | |
| LQLSRHNKQLQHLLKPVKRIQEEEAEGISSMLSLNNKQLSQMLKSSAPA | |
| QEEEEDPLAYYENHTSQIEIVRQDRSMEQIVFPVPGICQFLTEETKHRLF | |
| TTTEQDEQGSKVSDFFDQSSFLHNEMEWQRKLRSMPLIYWFSRRMT | |
| LADGSFVRCTPSENSDLFYAVPWSCGTLGFLVAAEIRIIPAKKYVKLRFEP | SEQ ID No 909 |
| VRGLEAICAKFTHESQRQENHFVEGLLYSLDEAVIMTGVMTDEAEPSKL | |
| NSIGNYYKPWFFKHVENYLKTNREGLEYIPLRHYYHRHTRSIFWELQDIIP | |
| FGNNPIFRYLFGWMVPPKISLLKLTQGETLRKLYEQHHVVQDMLVPMKC | |
| LQQALHTFQNDIHVYPIWLCPFILPSQPGLVHPKGNEAELYIDIGAYGEPR | |
| VKHFEARSCMRQLEKFVRSVHGFQMLYADCYMNREEFWEMFDGSLYH | |
| KLREKLGCQDAFPEVYDKICKAARH | |
| NPEYFSASDMYVPDEWEVPREQISIIRELGQGSFGMVYEGLARGLEAGE | SEQ ID No 910 |
| ESTPVALKTVNELASPRECIEFLKEASVMKAFKCHHWRLLGVVSQGQP | |
| TLVIMELMTRGDLKSHLRSLRPEAENNPGLPQPALGEMIQMAGEIADGM | |
| AYLAANKFVHRDLAARNCMVSQDFTVKIGDFGMTRDVYETDYYRKGGK | |
| GLLPVRWMAPESLKDGIFTTHSDVWSFGVVLWEIVTLAEQPYQGLSNEQ | |
| VLKFVMDGGVLEELEGCPLQLQELMSRCWQPNPRLRPSFTHILDSIQEE | |
| LRPSFRLLSFYYSPECRGARGSLPTTDAEPDSSPTPRDCSPQNGGPGH | |
| PAPSALTPKILDLLVHAISINSAYTTKILPPEKEGALPRQVGNKTECALLGF | SEQ ID No 911 |
| VLDLKRDFQPVREQIPEDKLYKVYTFNSVRKSMSTVIRMPDGGFRLFSK | |
| GASEILLKKCTNILNSNGELRGFRPRDRDDMVRKIIEPMACDGLRTICIAY | |
| RDFSAGQEPDWDNENEVVGDLTCIAVVGIEDPVRPEVPEAIRKCQRAGI | |
| TVRMVTGDNINTARAIAAKCGIIQPGEDFLCLEGKEFNRRIRNEKGEIEQE | |
| RLDKVWPKLRVLARSSPTDKHTLVKGIIDSTTGEQRQVVAVTGDGTNDG | |
| PALKKADVGFAMGIAGTDVAKEASDIILTDDNFTSIVKAVMWGRNVYDSI | |
| GGDQLNCHFGSILHTTGLQYRDFIHVSFHDKVYELPFLVALDHRKESVVV | SEQ ID No 912 |
| AVRGTMSLQDVLTDLSAESEVLDVECEVQDRLAHKGISQAARYVYQRLI | |
| NDGILSQAFSIAPEYRLVIVGHSLGGGAAALLATMLRAAYPQVRCYAFSP | |
| PRGLWSKALQEYSQSFIVSLVLGKDVIPRLSVTNLEDLKRRILRVVAHCN | |
| KPKYKILLHGLWYELFGGNPNNLPTELDGGDQEVLTQPLLGEQSLLTRW | |
| SPAYSFSSDSPLDSSPKYPPLYPPGRIIHLQEEGASGRFGCCSAAHYSA | |
| KWSHEAEFSKILIGPKMLTDHMPDILMRALDSVVSDRAACVSCPAQGVS | |
| SVDVA | |
| PYSQRPKAEDMDLEWRQGRMTRIILQDEDVTTKIECDWKRLNSLAHYQ | SEQ ID No 913 |
| VTDGSLVALVPKQVSAYNMANSFTFTRSLSRYESLLRTASSPDSLRSRA | |
| PMITPDQETGTKLWHLVKNHDHADHREGDRGSKMVSEIYLTRLLATKGT | |
| LQKFVDDLFETVFSTAHRGSALPLAIKYMFDFLDEQADQRQISDPDVRHT | |
| WKSNCLPLRFWVNVIKNPQFVFDIHKNSITDACLSVVAQTFMDSCSTSE | |
| HRLGKDSPSNKLLYAKDIPNYKSWVERYYRDIAKMASISDQDMDAYLVE | |
| QSRLHASDFSVLSALNELYFYVTKYRQEILTALDRDASCRKHKLRQKLEQ | |
| IISLVSSDS | |
| KSDAAMTVAVKMLKPSAHLTEREALMSELKVLSYLGNHMNIVNLLGACTI | SEQ ID No 914 |
| GGPTLVITEYCCYGDLLNFLRRKRDSFICSKQEDHAEAALYKNLLHSKES | |
| SCSDSTNEYMDMKPGVSYVVPTKADKRRSVRIGSYIERDVTPAIMEDDE | |
| LALDLEDLLSFSYQVAKGMAFLASKNCIHRDLAARNILLTHGRITKICDFG | |
| LARDIKNDSNYVVKGNARLPVKWMAPESIFNCVYTFESDVWSYGIFLWE | |
| LFSLGSSPYPGMPVDSKFYKMIKEGFRMLSPEHAPAEMYDIMKTCWDA | |
| DPLKRPTFKQIVQLIEKQISESTNHIYSNLANCSPNRQKPVVDHSVRINSV | |
| GSTASSSQPLLVHDDV | |
| HVPKSYRRRRRHKRKTGHKEKKEKERISENYSDKSDIENADESSSSILKP | SEQ ID No 915 |
| LISPAAERIRFILGEEDDSPAPPQLFTELDELLAVDGQEMEWKETARWIK | |
| FEEKVEQGGERWSKPHVATLSLHSLFELRTCMEKGSIMLDREASSLPQL | |
| VEMIVDHQIETGLLKPELKDKVTYTLLRKHRHQTKKSNLRSLADIGKTVSS | |
| ASRMFTNPDNGSPAMTHRNLTSSSLNDISDKPEKDQLKNKFMKKLPRD | |
| AEASNVLVGEVDFLDTPFIAFVRLQQAVMLGALTEVPVPTRFLFILLGPKG | |
| KAKSYHEIGRAIATLMSDEVFHDIAYKAKDRHDLIAGIDEFLDEVIVLPPGE | |
| WDPAIRIEPPKSLPSSDKRKNMYSGGENVQMNGDTPHDGGHGGGGHG | |
| DCEELQRTGRFCGGLIKDIKRKAPFFASDFYDALNIQ | |
| WIPDGENVKIPVAIKVLRENTSPKANKEILDEAYVMAGVGSPYVSRLLGIC | SEQ ID No 916 |
| LTSTVQLVTQLMPYGCLLDHVRENRGRLGSQDLLNWCMQIAKGMSYLE | |
| DVRLVHRDLAARNVLVKSPNHVKITDFGLARLLDIDETEYHADGGKVPIK | |
| WMALESILRRRFTHQSDVWSYGVTVWELMTFGAKPYDGIPAREIPDLLE | |
| KGERLPQPPICTIDVYMIMVKCWMIDSECRPRFRELVSEFSRMARDPQR | |
| FVVIQNEDLGPASPLDSTFYRSLLEDDDMGDLVDAEEYLVPQQGFFCPD | |
| PAPGAGGMVHHRHRSSSTRSGGGDLTLGLEPSEEEAPRSPLAPSEGA | |
| GSDVFDGDLGMGAAKGLQSLPTHDPSPLQRYSEDPTVPLPSETDGYVA | |
| PLTCSPQPEYVNQPDVRPQPPSPREGPLPAARPAGATLERPKTLSPGK | |
| NGVVKDVFAFGGAVENPEYLTPQGGAAPQPHPPPAFSPAFDNLYYWD | |
| QDPPERGAPPSTFKGTPTAENPEYLGLDVPV | |
| IMDPDEVPLDEQCERLPYDASKWEFARERLKLGKSLGRGAFGKVVQAS | SEQ ID No 917 |
| AFGIKKSPTCRTVAVKMLKEGATASEYKALMTELKILTHIGHHLNVVNLLG | |
| ACTKQGGPLMVIVEYCKYGNLSNYLKSKRDLFFLNKDAALHMEPKKEKM | |
| EPGLEQGKKPRLDSVTSSESFASSGFQEDKSLSDVEEEEDSDGFYKEPI | |
| TMEDLISYSFQVARGMEFLSSRKCIHRDLAARNILLSENNVVKICDFGLAR | |
| DIYKNPDYVRKGDTRLPLKWMAPESIFDKIYSTKSDVWSYGVLLWEIFSL | |
| GGSPYPGVQMDEDFCSRLREGMRMRAPEYSTPEIYQIMLDCWHRDPK | |
| ERPRFAELVEKLGDLLQANVQQDGKDYIPINAILTGNSGFTYSTPAFSED | |
| FFKESISAPKFNSGSSDDVRYVNAFKFMSLERIKTFEELLPNATSMFDDY | |
| QGDSSTLLASPMLKRFTWTDSKPKASLKIDLRVTSKSKESGLSDVSRPS | |
| FCHSSCGHVSEGKRRFTYDHAELERKIACCSPPPDYNSVVLYSTPPI | |
| IMDPGEVPLEEQCEYLSYDASQWEFPRERLHLGRVLGYGAFGKVVEAS | SEQ ID No 918 |
| AFGIHKGSSCDTVAVKMLKEGATASEHRALMSELKILIHIGNHLNVVNLLG | |
| ACTKPQGPLMVIVEFCKYGNLSNFLRAKRDAFSPCAEKSPEQRGRFRA | |
| MVELARLDRRRPGSSDRVLFARFSKTEGGARRASPDQEAEDLWLSPLT | |
| MEDLVCYSFQVARGMEFLASRKCIHRDLAARNILLSESDVVKICDFGLAR | |
| DIYKDPDYVRKGSARLPLKWMAPESIFDKVYTTQSDVWSFGVLLWEIFS | |
| LGASPYPGVQINEEFCQRLRDGTRMRAPELATPAIRRIMLNCWSGDPKA | |
| RPAFSELVEILGDLLQGRGLQEEEEVCMAPRSSQSSEEGSFSQVSTMAL | |
| HIAQADAEDSPPSLQRHSLAARYYNWVSFPGCLARGAETRGSSRMKTF | |
| EEFPMTPTTYKGSVDNQTDSGMVLASEEFEQIESRHRQESGFSCKGPG | |
| QNVAVTRAHPDSQGRRRRPERGARGGQVFYNSEYGELSEPSEEDHCS | |
| PSARVTFFTDNSY | |
| VMDPDELPLDEHCERLPYDASKWEFPRDRLKLGKPLGRGAFGQVIEAD | SEQ ID No 919 |
| AFGIDKTATCRTVAVKMLKEGATHSEHRALMSELKILIHIGHHLNVVNLLG | |
| ACTKPGGPLMVIVEFCKFGNLSTYLRSKRNEFVPYKTKGARFRQGKDYV | |
| GAIPVDLKRRLDSITSSQSSASSGFVEEKSLSDVEEEEAPEDLYKDFLTL | |
| EHLICYSFQVAKGMEFLASRKCIHRDLAARNILLSEKNVVKICDFGLARDI | |
| YKDPDYVRKGDARLPLKWMAPETIFDRVYTIQSDVWSFGVLLWEIFSLG | |
| ASPYPGVKIDEEFCRRLKEGTRMRAPDYTTPEMYQTMLDCWHGEPSQ | |
| RPTFSELVEHLGNLLQANAQQDGKDYIVLPISETLSMEEDSGLSLPTSPV | |
| SCMEEEEVCDPKFHYDNTAGISQYLQNSKRKSRPVSVKTFEDIPLEEPE | |
| VKVIPDDNQTDSGMVLASEELKTLEDRTKLSPSFGGMVPSKSRESVASE | |
| GSNQTSGYQSGYHSDDTDTTVYSSEEAELLKLIEIGVQTGSTAQILQPDS | |
| GTTLSSPPV | |
| FEPTVERGELVVRYRVRKSYSRRTTEATLNSLGISEELKEKLRDVMVDR | SEQ ID No 920 |
| HKVALGKTLGEGEFGAVMEGQLNQDDSILKVAVKTMKIAICTRSELEDFL | |
| SEAVCMKEFDHPNVMRLIGVCFQGSERESFPAPVVILPFMKHGDLHSFL | |
| LYSRLGDQPVYLPTQMLVKFMADIASGMEYLSTKRFIHRDLAARNCMLN | |
| ENMSVCVADFGLSKKIYNGDYYRQGRIAKMPVKWIAIESLADRVYTSKS | |
| DVWSFGVTMWEIATRGQTPYPGVENSEIYDYLRQGNRLKQPADCLDGL | |
| YALMSRCWELNPQDRPSFTELREDLENTLKALPPAQEPDEILYVNMDEG | |
| GGYPEPPGAAGGADPPTQPDPKDSCSCLTAAEVHPAGRYVLCPSTTPS | |
| PAQPADRGSPAAPGQEDGA | |
| WVPEGETVKIPVAIKILNETTGPKANVEFMDEALIMASMDHPHLVRLLGV | SEQ ID No 921 |
| CLSPTIQLVTQLMPHGCLLEYVHEHKDNIGSQLLLNWCVQIAKGMMYLE | |
| ERRLVHRDLAARNVLVKSPNHVKITDFGLARLLEGDEKEYNADGGKMPI | |
| KWMALECIHYRKFTHQSDVWSYGVTIWELMTFGGKPYDGIPTREIPDLL | |
| EKGERLPQPPICTIDVYMVMVKCWMIDADSRPKFKELAAEFSRMARDPQ | |
| RYLVIQGDDRMKLPSPNDSKFFQNLLDEEDLEDMMDAEEYLVPQAFNIP | |
| PPIYTSRARIDSNRSEIGHSPPPAYTPMSGNQFVYRDGGFAAEQGVSVP | |
| YRAPTSTIPEAPVAQGATAEIFDDSCCNGTLRKPVAPHVQEDSSTQRYS | |
| ADPTVFAPERSPRGELDEEGYMTPMRDKPKQEYLNPVEENPFVSRRKN | |
| GDLQALDNPEYHNASNGPPKAEDEYVNEPLYLNTFANTLGKAEYLKNNI | |
| LSMPEKAKKAFDNPDYWNHSLPPRSTLQHPDYLQEYSTKYFYKQNGRI | |
| RPIVAENPEYLSEFSLKPGTVLPPPPYRHRNTVV | |
| DLSNKINEMKTFNSPNLKDGRFVNPSGQPTPYATTQLIQSNLSNNMNNG | SEQ ID No 922 |
| SGDSGEKHWKPLGQQKQEVAPVQYNIVEQNKLNKDYRANDTVPPTIPY | |
| NQSYDQNTGGSYNSSDRGSSTSGSQGHKKGARTPKVPKQGGMNWAD | |
| LLPPPPAHPPPHSNSEEYNISVDESYDQEMPCPVPPARMYLQQDELEEE | |
| EDERGPTPPVRGAASSPAAVSYSHQSTATLTPSPQEELQPMLQDCPEE | |
| TGHMQHQPDRRRQPVSPPPPPRPISPPHTYGYISGPLVSDMDTDAPEE | |
| EEDEADMEVAKMQTRRLLLRGLEQTPASSVGDLESSVTGSMINGWGSA | |
| SEEDNISSGRSSVSSSDGSFFTDADFAQAVAAAAEYAGLKVARRQMQD | |
| AAGRRHFHASQCPRPTSPVSTDSNMSAAVMQKTRPAKKLKHQPGHLR | |
| RETYTDDLPPPPVPPPAIKSPTAQSKTQLEVRPVVVPKLPSMDARTDRS | |
| SDRKGSSYKGREVLDGRQVVDMRTNPGDPREAQEQQNDGKGRGNKA | |
| AKRDLPPAKTHLIQEDILPYCRPTFPTSNNPRDPSSSSSMSSRGSGSRQ | |
| REQANVGRRNIAEMQVLGGYERGEDNNEELEETES | |
| EPQDGCHPGDSVERSVTCLPSASDENENQLDGDGHEHLTSSDSAMGK | SEQ ID No 923 |
| PQVSEQDSLNNNESCTLSCEVAAGENLQNTLCEASRDEQAFLGKDKKIP | |
| GKRSPRSKKGTAKKIPPGLFSGDIAPLMQEKVLSAVTYAVDDEEAAEVN | |
| ANEQPEAPKLVLQSLFSLIRGEVEQLDSRALPLCLHQIAESYFQEEDYEK | |
| AMKFIQLERLYHEQLLANLSAIQEQWETKWKTVQPHTVTALRNSEKGFN | |
| GEDFERLTKICATHQDPLLSKHKIAAVEKSQERKCSTQLLVSEDPKEGGA | |
| TTKESESKTCLGTESSKESQHTVEPLGSSPCCHQMDVQTDSPSLSVTA | |
| GKDHMEELLCSAEATLALHTQSSETAGSPSGPDSSEDACEDDSRLQLA | |
| QTEACQDVARIEGIAEDPKVFLSSKSKTEPLISPGCDRIPPALISEGKYSQ | |
| AQRKELRLPLRDASEALPTDQLENNELNELQQPDLTDSDGKSPQAQAD | |
| SDGSENVLCGNNQISDLGILLPEVCMAPEEKGDKDDQLNKETEDYLNSL | |
| LEGCLKDTEDSLSYEDNQDDDSDLLQDLSPEEASYSLQENLPSDESCLS | |
| LDDLAKRIEIAEVVPTEGLVSILKKRNDTVGDHPAQMQHKPSKRRVRFQE | |
| IDDSLDQDEVGGGS | |
| SKNIPTTKDVEPLLEIDGDIRNFEVFLSSRTPVLVARDVKVFLPCTVNLDP | SEQ ID No 924 |
| KLREIIADVRAAREQISIGGLAYPPLPLHEGPPRAPSGYSQPPSVCSSTSF | |
| NGPFAGGVVSPQPHSSYYSGMTGPQHPFYNRPFFAPYLYTPRYYPGG | |
| SQHLISRPSVKTSLPRDQNNGLEVIKEDAAEGLSSPTDSSRGSGPAPGP | |
| VVLLNSLNVDAVCEKLKQIEGLDQSMLPQYCTTIKKANINGRVLAQCNID | |
| ELKKEMNMNFGDWHLFRSTVLEMRNAESHVVPEDPRFLSESSSGPAPH | |
| GEPARRASHNELPHTELSSQTPYTLNFSFEELNTLGLDEGAPRHSNLSW | |
| QSQTRRTPSLSSLNSQDSSIEISKLTDKVQAEYRDAYREYIAQMSQLEG | |
| GPGSTTISGRSSPHSTYYMGQSSSGGSIHSNLEQEKGKDSEPKPDDGR | |
| KSFLMKRGDVIDYSSSGVSTNDASPLDPITEEDEKSDQSGSKLLPGKKS | |
| SERSSLFQTDLKLKGSGLRYQKLPSDEDESGTEESDNTPLLKDDKDRKA | |
| EGKVERVPKSPEHSAEPIRTFIKAKEYLSDALLDKKDSSDSGVRSSESSP | |
| NHSLHNEVADDSQLEKANLIELEDDSHSGKRGIPHSLSGLQDPIIARMSIC | |
| SEDKKSPSECSLIASSPEENWPACQKAYNLNRTPSTVTLNNNSAPANRA | |
| NQNFDEMEGIRETSQVILRPSSSPNPTTIQNENLKSMTHKRSQRSSYTR | |
| LSKDPPELHAAASSESTGFGEERESIL | |
| WSLGVTLWELFDNAAQPYSNLSNLDVLNQVIRERDTKLPKPQLEQPYSD | SEQ ID No 925 |
| RWYEVLQFCWLSPEKRPAAEDVHRLLTYLRLQSQRDSEVDFEQQWNA | |
| LKPNTNSRDSSNNAAFPILDHFARDRLGREMEEVLTVTETSQGLSFEYV | |
| WEAAKHDHFDERSRGHLDEGLSYTSIFYPVEVFESSLSDPGPGKQDDS | |
| GQDVPLRVPGVVPVFDAHNLSVGSDYYIQLEEKSGSNLELDYPPALLTT | |
| DMDNPERTGPELSQLTALRSVELEESSTDEDFFQSSTDPKDSSLPGDLH | |
| VTSGPESPFNNIFNDVDKSEDLPSHQKIFDLMELNGVQADFKPATLSSSL | |
| DNPKESVITGHFEKEKPRKIFDSEPLCLSDNLMHQDNFDPLNVQELSENF | |
| LFLQEKNLLKGSLSSKEHINDLQTELKNAGFTEAMLETSCRNSLDTELQF | |
| AENKPGLSLLQENVSTKGDDTDVMLTGDTLSTSLQSSPEVQVPPTSFET | |
| EETPRRVPPDSLPTQGETQPTCLDVIVPEDCLHQDISPDAVTVPVEILST | |
| DARTHSLDNRSQDSPGESEETLRLTESDSVLADDILASRVSVGSSLPEL | |
| GQELHNKPFSEDHHSHRRLEKNLEAVETLNQLNSKDAAKEAGLVSALSS | |
| DSTSQDSLLEDSLSAPFPASEPSLETPDSLESVDVHEALLDSLGSHTPQK | |
| LVPPDKPADSGYETENLESPEWTLHPAPEGTADSEPATTGDGGHSGLP | |
| PNPVIVISDAGDGHRGTEVTPETFTAGSQGSYRDSAYFSDNDSEPEKRS | |
| EEVPGTSPSALVLVQEQPLPEPVLPEQSPAAQDSCLEARKSQPDESCLS | |
| ALHNSSDLELRATPEPAQTGVPQQVHPTEDEASSPWSVLNAELSSGDD | |
| FETQDDRPCTLASTGTNTNELLAYTNSALDKSLSSHSEGPKLKEPDIEGK | |
| YLGKLGVSGMLDLSEDGMDADEEDENSDDSDEDLRAFNLHSLSSESED | |
| ETEHPVPIILSNEDGRHLRSLLKPTAANAPDPLPEDWKKEKKAVTFFDDV | |
| TVYLFDQETPTKELGPCGGEACGPDLSGPAPASGSPYLSRCINSESSTD | |
| EEGGGFEWDDDFSPDPFMSKTTSNLLSSKPSLQTSKYFSPPPPARSTE | |
| QSWPHSAPYSRFSISPANIASFSLTHLTDSDIEQGGSSEDGEKD | |

[0318] In some embodiments, variants of the sequence ((L1-ITIM-L2)ⁿ-(L3-ITSM-LA)^{m})^{p} have at least 80%, 85%, 90%, 95%, 96%, 97%, 98%, 99% amino acid sequence identity with said sequence.

[0319] In some embodiments, variants of the sequence ((L1-ITIM-L2)ⁿ-(L3-ITSM-LA)^{m})^{p} have at least 95% amino acid sequence identity with said sequence.

[0320] In some embodiments, variants of the sequence ((L1-ITIM-L2)ⁿ-(L3-ITSM-L4)^{m})^{p} have at least 99% amino acid sequence identity with said sequence.

[0321] In some embodiments, variants of the sequence ((L1-ITIM-L2)ⁿ-(L3-ITSM-L4)^{m})^{p} have substantially the same activity as the non-variant sequence. In some embodiments, substantially the same activity refers to at least 80%, 85%, 90%, 95% of the activity of the non-variant sequence.

[0322] In some embodiments, substantially the same activity refers to at least 80%, 85%, 90%, 95% of the activity of the non-variant sequence as measured by monitoring the luciferase activity in reporter cells comprising a P-CAR and an N-CAR comprising the intracellular domain to be tested and incorporating inducible NFAT- or NfkB-regulated luciferase expression, such as for example as disclosed in Example 3 below.

### Transmembrane Domain of the N-CAR

[0323] With respect to the transmembrane domain, in various embodiments, a N-CAR can be designed to comprise a transmembrane domain that is attached to the extracellular domain of the N-CAR. A transmembrane domain can include one or more additional amino acids adjacent to the transmembrane region, e.g., one or more amino acid associated with the extracellular region of the protein from which the transmembrane was derived (e.g., 1, 2, 3, 4, 5, 6, 7, 8, 9, 10 up to 15 amino acids of the extracellular region) and/or one or more additional amino acids associated with the intracellular region of the protein from which the transmembrane protein is derived (e.g., 1, 2, 3, 4, 5, 6, 7, 8, 9, 10 up to 15 amino acids of the intracellular region). In one aspect, the transmembrane domain is one that is associated with one of the other domains of the N-CAR. In some instances, the transmembrane domain can be selected or modified by amino acid substitution to avoid binding of such domains to the transmembrane domains of the same or different surface membrane proteins, e.g., to minimize interactions with other members of the receptor complex. In one aspect, the transmembrane domain is capable of homodimerization with another CAR on the CAR T-cell surface. In a different aspect the amino acid sequence of the transmembrane domain may be modified or substituted so as to minimize interactions with the binding domains of the native binding partner present in the same CAR T-Cell.

[0324] The transmembrane domain may be derived either from a natural or from a recombinant source. Where the source is natural, the domain may be derived from any membrane-bound or transmembrane protein. In one aspect the transmembrane domain is capable of signaling to the intracellular domain(s) whenever the N-CAR has bound to a target. A transmembrane domain of particular use in this invention may include at least the transmembrane region(s) of e.g., the alpha, beta or zeta chain of the T-cell receptor, PD-1, 4-1BB, OX40, ICOS, CTLA-4, LAG3, 2B4, BTLA4, TIM-3, TIGIT, SIRPA, CD28, CD3 epsilon, CD45, CD4, CD5, CD8, CD9, CD16, CD22, CD33, CD37, CD64, CD80, CD86, CD134, CD137, CD154.

[0325] In some embodiment, the transmembrane domain of the N-CAR includes at least the transmembrane region(s) of PD-1 or CD28alpha.

[0326] In some embodiments, the transmembrane domain can be attached to the extracellular domain of the N-CAR, via a hinge, e.g., a hinge from a human protein. For example, in one embodiment, the hinge can be a human Ig (immunoglobulin) hinge, e.g., a PD-1 hinge, an IgG4 hinge, or a CD8alpha hinge.

[0327] In some embodiments, the transmembrane domain may be recombinant, in which case it will comprise predominantly hydrophobic residues such as leucine and valine. In one aspect a triplet of phenylalanine, tryptophan and valine can be found at each end of a recombinant transmembrane domain.

[0328] Optionally, a short oligo- or polypeptide linker, between 2 and 10 amino acids in length may form the linkage between the transmembrane domain and the cytoplasmic region of the N-CAR. A glycine-serine doublet provides a particularly suitable linker. For example, in one aspect, the linker comprises the amino acid sequence of GGGGSGGGGS. In some embodiments, the linker is encoded by a nucleotide sequence of GGTGGCGGAGGTTCTGGAGGTGGAGGTTCC.

### Extracellular Domain of the N-CAR

[0329] The antigen binding domain can be any domain that binds to the off-tissue antigen including but not limited to a monoclonal antibody, a recombinant antibody, a human antibody, a humanized antibody, and a functional fragment thereof, including but not limited to a single-domain antibody such as a heavy chain variable domain (VH), a light chain variable domain (VL) and a variable domain (VHH) of camelid derived nanobody, and to an alternative scaffold known in the art to function as antigen binding domain, such as a recombinant fibronectin domain, and the like. In some instances, it is beneficial for the antigen binding domain to be derived from the same species in which the N-CAR will ultimately be used in. For example, for use in humans, it may be beneficial for the antigen binding domain of the N-CAR to comprise human or humanized residues for the antigen binding domain of an antibody or antibody fragment.

[0330] A humanized antibody can be produced using a variety of techniques known in the art, including but not limited to, CDR-grafting (see, e.g., European Patent No. EP 239,400; International Publication No. WO 91/09967; and U.S. Pat. Nos. 5,225,539, 5,530,101, and 5,585,089, each of which is incorporated herein in its entirety by reference), veneering or resurfacing (see, e.g., European Patent Nos. EP 592,106 and EP 519,596; Padlan, 1991, Molecular Immunology, 28 (4/5): 489-498; Studnicka et al., 1994, Protein Engineering, 7 (6): 805-814; and Roguska et al., 1994, PNAS, 91:969-973, each of which is incorporated herein by its entirety by reference), chain shuffling (see, e.g., U.S. Pat. No. 5,565,332, which is incorporated herein in its entirety by reference), and techniques disclosed in, e.g., U.S. Patent Application Publication No. US2005/0042664, U.S. Patent Application Publication No. US2005/0048617, U.S. Pat. Nos. 6,407,213, 5,766,886, International Publication No. WO 9317105, Tan et al., J. Immunol., 169:1119-25 (2002), Caldas et al., Protein Eng., 13 (5): 353-60 (2000), Morea et al., Methods, 20 (3): 267-79 (2000), Baca et al., J. Biol. Chem., 272 (16): 10678-84 (1997), Roguska et al., Protein Eng., 9 (10): 895-904 (1996), Couto et al., Cancer Res., 55 (23 Supp): 5973s-5977s (1995), Couto et al., Cancer Res., 55 (8): 1717-22 (1995), Sandhu J S, Gene, 150 (2): 409-10 (1994), and Pedersen et al., J. Mol. Biol., 235 (3): 959-73 (1994), each of which is incorporated herein in its entirety by reference. Often, framework residues in the framework regions will be substituted with the corresponding residue from the CDR donor antibody to alter, for example improve, antigen binding. These framework substitutions are identified by methods well-known in the art, e.g., by modeling of the interactions of the CDR and framework residues to identify framework residues important for antigen binding and sequence comparison to identify unusual framework residues at particular positions. (Sec, e.g., Queen et al., U.S. Pat. No. 5,585,089; and Riechmann et al., 1988, Nature, 332:323, which are incorporated herein by reference in their entireties.).

[0331] In some aspects, the portion of an N-CAR that comprises an antibody fragment is humanized with retention of high affinity for the target antigen and other favorable biological properties. According to one aspect of the invention, humanized antibodies and antibody fragments are prepared by a process of analysis of the parental sequences and various conceptual humanized products using three-dimensional models of the parental and humanized sequences. Three-dimensional immunoglobulin models are commonly available and are familiar to those skilled in the art. Computer programs are available which illustrate and display probable three-dimensional conformational structures of selected candidate immunoglobulin sequences. Inspection of these displays permits analysis of the likely role of the residues in the functioning of the candidate immunoglobulin sequence, e.g., the analysis of residues that influence the ability of the candidate immunoglobulin to bind the target antigen. In this way, FR residues can be selected and combined from the recipient and import sequences so that the desired antibody or antibody fragment characteristic, such as increased affinity for the target antigen, is achieved. In general, the CDR residues are directly and most substantially involved in influencing antigen binding.

[0332] In some embodiments, the antibody binding domain is a fragment, e.g., a single chain variable fragment (scFv). In some embodiments, the antibody binding domain is a Fv, a Fab, a (Fab′)2, or a bi-functional (e.g. bi-specific) hybrid antibody (e.g., Lanzavecchia et al., Eur. J. Immunol. 17, 105 (1987)). In some embodiments, the antigen binding domain of the N-CAR of the invention binds an off-tissue antigen with wild-type or enhanced affinity.

[0333] In some instances, scFvs can be prepared according to method known in the art (see, for example, Bird et al., (1988) Science 242:423-426 and Huston et al., (1988) Proc. Natl. Acad. Sci. USA 85:5879-5883). ScFv molecules can be produced by linking VH and VL regions together using flexible polypeptide linkers. The scFv molecules comprise a linker (e.g., a Ser-Gly linker) with an optimized length and/or amino acid composition. The linker length can greatly affect how the variable regions of a scFv fold and interact. In fact, if a short polypeptide linker is employed (e.g., between 5-10 amino acids) intrachain folding is prevented. Interchain folding is also required to bring the two variable regions together to form a functional epitope binding site. For examples of linker orientation and size see, e.g., Hollinger et al. 1993 Proc Natl Acad. Sci. U.S.A. 90:6444-6448, U.S. Patent Application Publication Nos. 2005/0100543, 2005/0175606, 2007/0014794, and PCT publication Nos. WO2006/020258 and WO2007/024715, is incorporated herein by reference.

[0334] An scFv can comprise a linker of at least 1, 2, 3, 4, 5, 6, 7, 8, 9, 10, 11, 12, 13, 14, 15, 16, 17, 18, 19, 20, 25, 30, 35, 40, 45, 50, or more amino acid residues between its VL and VH regions. The linker sequence may comprise any naturally occurring amino acid. In some embodiments, the linker sequence comprises amino acids glycine and serine. In another embodiment, the linker sequence comprises sets of glycine and serine repeats such as (Gly₄Ser)ₙ, where n is a positive integer equal to or greater than 1. In one embodiment, the linker can be (Gly₄Ser)₄ or (Gly₄Ser)₃. Variation in the linker length may retain or enhance activity, giving rise to superior efficacy in activity studies.

[0335] In a preferred embodiment, the antigen binding domain of the N-CAR comprises an scFv.

[0336] The off-tissue antigen recognized by the antigen binding domain of the N-CAR is preferably an antigen that is not present or present at low level on the tumour cells targeted by the P-CAR.

[0337] The below table provide examples of combinations of N-CAR and P-CAR antigens.

| P-CAR | |
|---|---|
| Antigen | N-CAR Antigen |
| CD33 | Antigens specifically expressed in dendritic cells and/or haema- |
| | topoetic stem cells such as ITGAX, CD1E, CD34, CD1C, |
| | CD123, CD141 |
| FLT3 | Antigens specifically expressed in haematopoetic stem cells |
| | such as CD34 or specifically expressed in Brain cerebellum such |
| | as ZP2, GABRA6, CRTAM, GRM4, MDGA1 |
| MSLN | Antigens specifically expressed in lung such as SFTPC, ROS1, |
| | SLC6A4, AGTR2 |
| MUC16 | Antigens specifically expressed in salivary gland such as |
| | LRRC26, HTR3A, TMEM211, MRGPRX3 |
| MUC17 | Antigens specifically expressed in colon & small intestine such |
| | as MEP1B, TMIGD1, CEACAM20, ALPI |

[0338] N-CAR antigens could also include antigens that are independent of the antigen that the P-CAR is targeting and that are down-regulated in tumor of interest, but present in all normal tissues of concern. Examples of such antigens for pancreatic ductal adenocarcinoma are TMPRSS11B, CYP17A1 and ATP4B and examples of such antigens for kidney clear cell carcinoma are GP2, MUC21, CLCA4 and SLC27A6.

[0339] The present invention encompasses a recombinant DNA construct comprising sequences encoding an N-CAR as defined above, wherein the N-CAR comprises an extracellular domain such as an antibody fragment that binds specifically to an off-tumor antigen, and wherein the sequence of the extracellular domain is contiguous with and in the same reading frame as a nucleic acid sequence encoding a transmembrane domain and an intracellular domain. In some embodiments, an exemplary N-CAR construct comprises an optional leader sequence, an extracellular off-tissue antigen binding domain, a hinge, a transmembrane domain, and an intracellular inhibitory signaling domain.

[0340] The present invention includes retroviral and lentiviral vector constructs expressing an N-CAR that can be directly transduced into a cell.

[0341] The present invention also includes an RNA construct that can be directly transfected into a cell. A method for generating mRNA for use in transfection involves in vitro transcription (IVT) of a template with specially designed primers, followed by polyA addition, to produce a construct containing 3′ and 5′ untranslated sequence (“UTR”), a 5′ cap and/or Internal Ribosome Entry Site (IRES), the nucleic acid to be expressed, and a polyA tail, typically 50-2000 bases in length. RNA so produced can efficiently transfect different kinds of cells. In one embodiment, the template includes sequences for the N-CAR. In an embodiment, an RNA N-CAR vector is transduced into a T-cell by electroporation.

[0342] In some embodiments, the invention relates to an isolated immune cell comprising an N-CAR as defined herein. In some embodiments, the invention further relates to immune cells comprising an N-CAR as defined herein and a P-CAR. In some embodiments, said immune cell is a T-cell. In some embodiments, said T-cell is a human T-cell.

[0343] The term “positive signaling Chimeric Antigen Receptor” or alternatively a “P-CAR” refers to a recombinant polypeptide construct comprising at least an extracellular domain comprising an antigen binding domain, a transmembrane domain and an intracellular domain (also referred to herein as a “cytoplasmic signaling domain” or “an intracellular signaling domain”) comprising a functional signaling domain derived from a stimulatory molecule as defined below. In some embodiments, the stimulatory molecule is the zeta chain associated with the T-cell receptor complex. In some embodiments, the cytoplasmic signaling domain further comprises one or more functional signaling domains derived from at least one costimulatory molecule as defined below. In some embodiments, the costimulatory molecule is chosen from 4-1BB (i.e., CD137), CD27 and/or CD28. In some embodiments, the P-CAR comprises a chimeric fusion protein comprising an extracellular antigen recognition domain, a transmembrane domain and an intracellular signaling domain comprising a functional signaling domain derived from a stimulatory molecule. In some embodiments, the P-CAR comprises a chimeric fusion protein comprising an extracellular antigen recognition domain, a transmembrane domain and an intracellular signaling domain comprising a functional signaling domain derived from a co-stimulatory molecule and a functional signaling domain derived from a stimulatory molecule. In some embodiments, the P-CAR comprises a chimeric fusion protein comprising an extracellular antigen recognition domain, a transmembrane domain and an intracellular signaling domain comprising two functional signaling domains derived from one or more co-stimulatory molecule(s) and a functional signaling domain derived from a stimulatory molecule. In some embodiments, the P-CAR comprises a chimeric fusion protein comprising an extracellular antigen recognition domain, a transmembrane domain and an intracellular signaling domain comprising at least two functional signaling domains derived from one or more co-stimulatory molecule(s) and a functional signaling domain derived from a stimulatory molecule. In some embodiments the P-CAR comprises an optional leader sequence at the amino-terminus (N-ter) of the P-CAR fusion protein. In some embodiments, the P-CAR further comprises a leader sequence at the N-terminus of the extracellular antigen recognition domain, wherein the leader sequence is optionally cleaved from the antigen recognition domain (e.g., aa scFv) during cellular processing and localization of the P-CAR to the cellular membrane.

[0344] The extracellular portion of a P-CAR comprising an antibody or antibody fragment thereof may exist in a variety of forms where the antigen binding domain is expressed as part of a contiguous polypeptide chain including, for example, a single domain antibody fragment (sdAb), a single chain antibody (scFv) and a humanized antibody (Harlow et al., 1999, In: Using Antibodies: A Laboratory Manual, Cold Spring Harbor Laboratory Press, NY; Harlow et al., 1989, In: Antibodies: A Laboratory Manual, Cold Spring Harbor, New York; Houston et al, 1988, Proc. Natl. Acad. Sci. USA 85:5879-5883; Bird et al., 1988, Science 242:423-426).

[0345] The term “stimulatory molecule,” refers to a molecule expressed by a T-cell that provides the positive cytoplasmic signaling sequence(s) that regulate positive activation of the TCR complex in a stimulatory way for at least some aspect of the T-cell signaling pathway. In some embodiments, the positive signal is initiated by, for instance, binding of a TCR/CD3 complex with an MHC molecule loaded with peptide, and which leads to mediation of a T-cell response, including, but not limited to, proliferation, activation, differentiation, and the like. A positive cytoplasmic signaling sequence (also referred to as a “positive signaling domain” or positive intracellular signaling domain) that acts in a stimulatory manner may contain a signaling motif which is known as immunoreceptor tyrosine-based activation motif or ITAM. Examples of an ITAM containing positive cytoplasmic signaling sequence includes, but is not limited to, those derived from TCR zeta (or CD3zeta), FcR gamma, FcR beta, CD3 gamma, CD3 delta, CD3 epsilon, CD5, CD22, CD79a, CD79b, CD278 (also known as “ICOS”) and CD66d.

[0346] In some aspect, the intracellular signaling domain of the P-CAR can comprise a positive intracellular signaling domain. The positive intracellular signaling domain generates a signal that promotes an immune effector function of the P-CAR containing cell, e.g., a P-CAR T-cell. Examples of immune effector function, e.g., in a P-CAR T-cell, include cytolytic activity and helper activity, including the secretion of cytokines.

[0347] The term “costimulatory molecule” refers to the cognate binding partner on a T-cell that specifically binds with a costimulatory ligand, thereby mediating a costimulatory response by the T-cell, such as, but not limited to, proliferation. Costimulatory molecules are cell surface molecules other than antigen receptors or their ligands that are required for an efficient immune response. Costimulatory molecules include, but are not limited to an MHC class I molecule, BTLA and a Toll ligand receptor, as well as OX40, CD2, CD27, CD28, CDS, ICAM-1, LFA-1 (CD11a/CD18) and 4-IBB (CD137).

[0348] A costimulatory intracellular signaling domain can be the intracellular portion of a costimulatory molecule. A costimulatory molecule can be represented in the following protein families: TNF receptor proteins, Immunoglobulin-like proteins, cytokine receptors, integrins, signaling lymphocytic activation molecules (SLAM proteins), and activating NK cell receptors. Examples of such molecules include CD27, CD28, 4-1BB (CD137), OX40, GITR, CD30, CD40, ICOS, BAFFR, HVEM, lymphocyte function-associated antigen-1 (LFA-1), CD2, CD7, LIGHT, NKG2C, SLAMF7, NKp80, CD160, B7-H3, and a ligand that specifically binds with CD83, and the like.

[0349] P-CARs and immune cells comprising them have been extensively disclosed and can be prepared by the skilled person according to known methods. For example, methodologies to prepare P-CAR and cells comprising such P-CARs are disclosed in U.S. Pat. No. 7,446,190, WO2008/121420, U.S. Pat. No. 8,252,592, US20140024809, WO2012/079000, WO2014153270, WO2012/099973, WO2014/011988, WO2014/011987, WO2013/067492, WO2013/070468, WO2013/040557, WO2013/126712, WO2013/126729, WO 2013/126726, WO2013/126733, U.S. Pat. No. 8,399,645, US20130266551, US20140023674, WO2014039523, U.S. Pat. Nos. 7,514,537, 8,324,353, WO2010/025177, U.S. Pat. No. 7,446,179, WO2010/025177, WO2012/031744, WO2012/136231A1, WO2012/050374A2, WO2013074916, WO2009/091826A3, WO2013/176915 or WO/2013/059593 which are all incorporated herein in their entirety by reference. Immune cells comprising a P-CAR and a N-CAR can be prepared by the skilled person according to the methodologies disclosed in the above mentioned references. In a preferred embodiment, immune cells comprising a P-CAR and a N-CAR can be prepared by the skilled person according to the methodologies disclosed in WO2013/176915.

[0350] In some embodiments, the method of engineering T-cells of invention can comprise:
[0351] (a) modifying T-cells by inactivating at least:
   [0352] A first gene expressing a target for an immunosuppressive agent, and
   [0353] A second gene encoding a component of the T-cell receptor (TCR)
[0354] (b) Expanding said cells, optionally in presence of said immunosuppressive agent.

[0355] An immunosuppressive agent is an agent that suppresses immune function by one of several mechanisms of action. In other words, an immunosuppressive agent is a role played by a compound which is exhibited by a capability to diminish the extent and/or voracity of an immune response. As non-limiting example, an immunosuppressive agent can be a calcineurin inhibitor, a target of rapamycin, an interleukin-2 u-chain blocker, an inhibitor of inosine monophosphate dehydrogenase, an inhibitor of dihydrofolic acid reductase, a corticosteroid or an immunosuppressive antimetabolite.

[0356] In a particular embodiment, the genetic modification step of the method relies on the inactivation of one gene selected from the group consisting of CD52, GR, TCR alpha and TCR beta. In another embodiment, the genetic modification step of the method relies on the inactivation of two genes selected from the group consisting of CD52 and GR, CD52 and TCR alpha, CDR52 and TCR beta, GR and TCR alpha, GR and TCR beta, TCR alpha and TCR beta. In another embodiment, the genetic modification step of the method relies on the inactivation of more than two genes. The genetic modification is preferably operated ex-vivo.

[0357] In some embodiments, the method of engineering T-cells of invention can comprise
[0358] (a) Providing a T-cell, preferably from a cell culture or from a blood sample;
[0359] (b) Selecting a gene in said T-cell expressing a target for an immunosuppressive agent;
[0360] (c) Transforming said T cell with nucleic acid encoding a rare-cutting endonuclease able to selectively inactivate by DNA cleavage, preferably by double-strand break respectively: said gene encoding a target for said immunosuppressive agent, and at least one gene encoding a component of the T-cell receptor (TCR);
[0361] (d) Expressing said rare-cutting endonucleases into said T-cells;
[0362] (e) Sorting the transformed T-cells, which do not express TCR on their cell surface;
[0363] (f) Expanding said cells, optionally in presence of said immunosuppressive agent.

[0364] In some embodiment, the method to engineer cell of the invention further comprises one or more additional genomic modification step. By additional genomic modification step, can be intended the introduction into cells to engineer of one or more protein of interest. Said protein of interest can be a P-CAR and/or an N-CAR.

[0365] In some embodiment the P-CAR is a Multi-chain Chimeric Antigen Receptor particularly adapted to the production and expansion of engineered T-cells, the multi-chain CAR comprising at least two of the following components:
[0366] a) one polypeptide comprising the transmembrane domain of FcsRI alpha chain and an extracellular ligand-binding domain,
[0367] b) one polypeptide comprising a part of N- and C-terminal cytoplasmic tail and the transmembrane domain of FccRI beta chain and/or
[0368] c) two polypeptide s comprising each a part of intracytoplasmic tail and the transmembrane domain of FccRI gamma chain, whereby different polypeptides multimerize together spontaneously to form dimeric, trimeric or tetrameric CAR.

[0369] Example of tetrameric P-CARs are illustrated in FIG. 3 of WO2013176915 and different versions of multichain P-CARs are represented in FIG. 4 of WO2013176915. Such P-CAR can be expressed in a T-Cell obtained using the above disclosed method together with a N-CAR according to the present disclosure to obtain a T-cell according to the invention.

[0370] In some embodiment the invention relates to an immune cell comprising a N-CAR as defined herein and a P-CAR as defined in any of U.S. Pat. No. 7,446,190, WO2008/121420, U.S. Pat. No. 8,252,592, US20140024809, WO2012/079000, WO2014153270, WO2012/099973, WO2014/011988, WO2014/011987, WO2013/067492, WO2013/070468, WO2013/040557, WO2013/126712, WO2013/126729, WO 2013/126726, WO2013/126733, U.S. Pat. No. 8,399,645, US20130266551, US20140023674, WO2014039523, U.S. Pat. Nos. 7,514,537, 8,324,353, WO2010/025177, U.S. Pat. No. 7,446,179, WO2010/025177, WO2012/031744, WO2012/136231A1, WO2012/050374A2, WO2013074916, WO/2009/091826A3, WO2013/176915 or WO/2013/059593.

[0371] In some embodiments, the immune cell comprises an N-CAR as defined herein and a multi-chain P-CAR as defined in WO2014/039523.

[0372] In some embodiments, the immune cell of the invention is activated when the P-CAR antigen binding domain binds to its antigen. In some embodiments, such activation is reduced when the N-CAR antigen binding domain binds to its antigen. In some embodiments such reduction of activation is increased, preferably by at least 5%, 10%, 15%, 20% or 30% in an immune cell comprising an N-CAR according to the invention as compared to the same immune cell comprising an N-CAR comprising the full intracellular domain of PD-1. In some embodiments such reduction of activation is increased, preferably by at least 5%, 10%, 15%, 20% or 30% in an immune cell comprising an N-CAR according to the invention as compared to the same immune cell comprising an N-CAR comprising the full intracellular domain of CTLA-4.

[0373] In some embodiments, the activation is reduced by at least 5%, 10%, 15%, 20%, 25%, 30%, 35%, 40%, 45%, 50%, 55%, 60%, 65%, 70%, 75%, 80%, 85% when the N-CAR and P-CAR antigen binding domains both binds to their respective antigens as compared to when only the CAR antigen binding domain binds to its antigen.

[0374] In some embodiments, the level of activation of the immune cell is measured by determining cytokine production. In some embodiments, the level of activation of the immune cell is measured by monitoring IFNgamma production by ELISA and/or FACS and/or luminex assay. In some embodiments, the level of activation of the immune cell is measured by monitoring TNFalpha production by ELISA and/or luminex assay.

[0375] In some embodiments, the level of activation of the immune cell is measured by monitoring degranulation, for example by measuring CD107a levels by FACS.

[0376] In some embodiments, the level of activation of the immune cell is measured by monitoring the ability of the immune cell to kill target cells.

[0377] In some embodiments, the level of activation of the immune cell is measured by monitoring the luciferase activity in reporter cells incorporating inducible NFAT- or NfkB-regulated luciferase expression, such as for example as disclosed in Example 3 below.

[0378] In some embodiments, the negative signal of the N-CAR is short-termed and reversible to ensure that the immune cells comprising a P-CAR and an N-CAR according to the invention may be activated when it encounters only P-CAR antigen, despite prior inactivation in a off-tissue setting that has both P-CAR and N-CAR antigens.

### EXAMPLES

### Example 1-Identification of Inhibitory Domains to be Used in N-CARs

[0379] There are several receptors, i.e. CTLA-4, PD-1, BTLA, TIM-3, LAG3 that are known to provide a negative signal to attenuate or abrogate T-cell signaling. The intracellular signaling components of PD-1 were studied to identify motifs that may be responsible for its activity. PD-1 contains both an immunoreceptor tyrosine-based inhibitory motif (ITIM) and immunoreceptor tyrosine-based switch motif (ITSM) and data suggests that the ITSM domain plays a significant role in recruiting phosphatases (i.e. SHP2) that enable inactivation of upstream signaling components, like CD3zeta (see Riley JL., Immunol Rev. 2009 May; 229 (1): 114-25; or Yokosuka T et al., J Exp Med. 2012 Jun. 4; 209 (6): 1201-17). Other receptors and molecules with ITSMs were identified and analyzed to help understand the functional role of this sequence motif with the intention to utilize it in providing a negative signal that attenuates or abrogates T-cell activation caused by engagement of the P-CAR. Protein sequences were downloaded from swissprot database restricting to sequences that were annotated as being cytoplasmic. Each of these cytoplasmic sequences was searched for the patterns of interest (ITIM motif, ITSM motif or ITIM and ITSM motif).

### Example 2-Design of N-CARs

[0380] N-CARs comprising at least one ITSM, alone or in combination with one or more ITIMs or other inhibitory domain such as those of TIM-3, LAG-3 or CTLA4 are prepared in an effort to generate effective NOT gates.

[0381] In particular, the following N-CARs are prepared:
[0382] N-CARs comprising multiple tandems PD-1 ITIM-ITSM;
[0383] N-CARs comprising multiple tandems PD-1 ITSM;
[0384] N-CARs comprising single or multiple non-PD1 natural ITSM or ITIM-ITSM;
[0385] N-CARs comprising synthetic ITSM or ITIM-ITSM;
[0386] N-CARS comprising at least one ITSM and signaling domains from other inhibitory receptors such as TIM-3, LAG-3 or CTLA4.

### Example 3—Activity of T-Cells Comprising a P-CAR and a N-CAR in Immortalized Human T-Cells

[0387] An experimental model is used to test the N-CARs designed according to Example 2. The model consists of a positive signaling CAR (P-CAR) construct containing from the N-terminus, a signaling domain or secretory signal domain (e.g. CD8 secretory signal sequence), anti-CD-19 single-chain antibody, hinge (e.g. CD8alpha), transmembrane (e.g CD8alpha), and positive intracellular signaling domains (e.g. 41BB and CD3zeta). The P-CAR is followed by or preceded by a fluorescent marker (e.g. EGFP) or antibiotic resistance gene separated from the P-CAR by either a P2A or IRES (see for example Table 9).

[0388] This construct is constructed using standard molecular biology methods and transduced into T-cell receptor (TCR) negative or an NFAT- or NfkB-regulated luciferase reporter Jurkat cell-line. These cells are purified using bulk FACS sorting using the fluorescent marker or by selection in the appropriate antibiotic followed by flow cytometry to confirm surface CAR expression, and tested for activity against differentially expressing CD19 cell-lines to establish activation, proliferation, and cytokine release, and degranulation/cytotoxicity thresholds. Once an appropriate P-CAR cell line has been identified, these cells are transduced with a plasmid containing the negative signaling CAR (N-CAR) construct containing from the N-terminus, a signaling domain (e.g. CD8 secretory signal sequence), anti-PSMA single-chain antibody, hinge (e.g. truncated PD-1 extracellular domain), transmembrane (e.g. PD-1), and negative intracellular signaling domains to be evaluated (native or modified ITSMs optionally in combination with ITIMs or other inhibitory signaling domains) followed by or preceded by a fluorescent marker (e.g. mCherry) or antibiotic-resistance gene separated from the N-CAR by either a P2A or IRES. Multiple versions of these N-CAR constructs are constructed, using standard site-directed and cassette mutagenesis. The T-cells comprising a P-CAR and a N-CAR (also named P-CAR⁺/N-CAR⁺T-cells or NOT GATE CAR T-Cells) are purified by bulk FACS sorting on both fluorescent markers (e.g. EGFP and mCherry) or by sequential selection in appropriate antibiotics followed by dual-color flow cytometry to detect surface expression of both CARs, and tested first for retention of P-CAR activity on CD19 expressing cells and then the potency of negative signal on cells expressing both CD19 and PSMA. The N-CAR candidates are characterized by their ability to attenuate positive signal from P-CAR on varying levels of both the P-CAR and N-CAR antigens by monitoring NFAT- or NfkB-regulated luciferase reporter activity, cytokine production (IFNgamma by ELISA/FACS), degranulation (CD107a levels) and killing of target cells (by FACS). Reversibility and the kinetics of reversibility of the N-CAR signal are tested by first incubating the P-CAR⁺/N-CAR⁺T-cells with cells expressing both CD19 and PSMA, purifying them followed by incubation with CD19 cells. The cytokine production and cytotoxicity of these cells are compared to cells that were directly incubated with CD19 cells.

### Experiment and Results

[0389] Jurkat cells (clone E6-1 ATCC #TIB-152) were maintained at a density of 0.4-2×10⁶ cells/mL in RPMI 1640 (Life Technologies) containing 10% fetal bovine serum (hyclone), 1 mM sodium pyruvate, 1×glutaMAX, 1× nonessential amino acids (Mediatech), and 25 mM HEPES buffer. 293T cells (clone HEK-293T/17, ATCC CRL-11268) were maintained subconfluently in DMEM containing 4.5 g/L glucose, 10% fetal bovine serum, 1 mM sodium pyruvate, 1×glutaMAX, 1× nonessential amino acids, and 25 mM HEPES.

[0390] Lentiviral particles (LV) were produced by transient transfection of sub-confluent 293T cells in 6-well plates with a transfer vector (pLVX) encoding the CAR or protein of interest, an HIV-1 gag pol packaging plasmid (psPAX2), and a VSV-G expression plasmid (pMD2.G) at a 4:3:1 ratio, using Lipofectamine 2000 (Invitrogen). The following day the media was replaced, and 48 h after transfection the LV was harvested and filtered through a 0.45 um Millex-HV syringe filter (Millipore). Fresh LV supernatant was used immediately to transduce sub-confluent Jurkat or 293T cells by diluting LV sup in an equal volume of cell culture medium.

[0391] Artificial antigen-presenting cells (AAPCs) were prepared by sequential LV transduction of 293T cells. Subconfluent 293T cells were transfected with pLVX expression constructs encoding either codon-optimized full-length human CD19 (NP_001171569), full-length human PSMA (NP_004467), or empty vector. The pLVX vectors comprised a puromycin-resistance gene followed by a P2A sequence and the target antigen. Transduced 293 Ts were subsequently selected in puromycin-containing media, and maintained as pools of expressing clones. Surface antigen expression was determined by flow cytometry, using APC-conjugated goat F(ab′)₂-anti-human PSMA (clone LN1-17, BioLegend cat #342504) or BV421-conjugated mouse-anti-human CD19 (clone HIB19, BD Biosciences cat #562440). Cells were sorted by FACS into populations of CD19 low-expressing or high-expressing clones, PSMA low-expressing or high-expressing clones, and dual CD19 low/PSMA high-expressers or dual CD19 high/PSMA high-expressers.

[0392] For determination of T cell activation, a luciferase reporter assay was established in Jurkat cells. Jurkat cells were transduced to stably express a firefly luciferase gene under the control of a minimal (m) CMV promoter and tandem repeats of either the NFkB or NFAT transcriptional response element (TRE) [(Qiagen Cignal Lentivirus]. Transcription factors recognizing these TREs play important roles in T cell signal transduction pathways and are integral in the transcriptional regulation of cytokine genes and other genes critical for the immune response. Upon T cell receptor activation, luciferase reporter activity is modulated and can be measured by quantitative luminometry.

[0393] Reporter Jurkat cells (either NFAT-Luc or NFkB-Luc) were subsequently transduced to stably express different combinations of P- and N-CARs. pLVX-CAR encoding constructs comprised an antibiotic resistance gene (puromycin resistance for P-CARS and blasticidin resistance for N-CARs) followed by a P2A sequence and the P- or N-CAR.

[0394] In particular, N-FAT-Luc and NFkB-Luc Jurkat cells expressing P-CAR1 or P-CAR2 and an N-CAR comprising an intracellular domain selected from the sequences listed in Table 10 were prepared.

[0395] P-CAR1 comprises a ScFv from anti-CD19 antibody FMC63 (see Nicholson et al, (1997), Mol. Immunol. 34:1157-1165), a CD8 alpha hinge and transmembrane domain, and an intracellular domain comprising a 4-1BB and CD3zeta intracellular signaling domains.

[0396] P-CAR2 comprises a ScFv from anti-CD19 antibody SJ25C1 (see US2013063097), a CD28 hinge and transmembrane domain, and an intracellular domain comprising a CD28 and CD3zeta intracellular signaling domains.

[0397] The specific sequences of P-CAR1 and P-CAR2 are listed in Table 9.

TABLE 9

| | |
|---|---|
| P-CAR1 | MALPVTALLLPLALLLHAARPDIQMTQTTSSLSASLGDRVTISCRASQDISKYLN |
| (SEQ ID | WYQQKPDGTVKLLIYHTSRLHSGVPSRFSGSGSGTDYSLTISNLEQEDIATYFC |
| No 2019) | QQGNTLPYTFGGGTKLEITGGGGSGGGGSGGGGSEVKLQESGPGLVAPSQS |
| | LSVTCTVSGVSLPDYGVSWIRQPPRKGLEWLGVIWGSETTYYNSALKSRLTIIK |
| | DNSKSQVFLKMNSLQTDDTAIYYCAKHYYYGGSYAMDYWGQGTSVTVSSTTT |
| | PAPRPPTPAPTIASQPLSLRPEACRPAAGGAVHTRGLDFACDIYIWAPLAGTC |
| | GVLLLSLVITLYCKRGRKKLLYIFKQPFMRPVQTTQEEDGCSCRFPEEEEGGC |
| | ELRVKFSRSADAPAYKQGQNQLYNELNLGRREEYDVLDKRRGRDPEMGGKP |
| | RRKNPQEGLYNELQKDKMAEAYSEIGMKGERRRGKGHDGLYQGLSTATKDT |
| | YDALHMQALPPR |
| P-CAR2 | MALPVTALLLPLALLLHAEVKLQQSGAELVRPGSSVKISCKASGYAFSSYWMN |
| (SEQ ID | VVVKQRPGQGLEWIGQIYPGDGDTNYNGKFKGQATLTADKSSSTAYMQLSGL |
| No 2020) | TSEDSAVYFCARKTISSVVDFYFDYWGQGTTVTVSSGGGGSGGGGSGGGGS |
| | DIELTQSPKFMSTSVGDRVSVTCKASQNVGTNVAWYQQKPGQSPKPLIYSAT |
| | YRNSGVPDRFTGSGSGTDFTLTITNVQSKDLADYFCQQYNRYPYTSGGGTKL |
| | EIKRAAAIEVMYPPPYLDNEKSNGTIIHVKGKHLCPSPLFPGPSKPFWVLVVVG |
| | GVLACYSLLVTVAFIIFWVRSKRSRLLHSDYMNMTPRRPGPTRKHYQPYAPPR |
| | DFAAYRSRVKFSRSADAPAYQQGQNQLYNELNLGRREEYDVLDKRRGRDPE |
| | MGGKPRRKNPQEGLYNELQKDKMAEAYSEIGMKGERRRGKGHDGLYQGLST |
| | ATKDTYDALHMQALPPR |

[0398] The tested N-CARs comprise an amino acid sequence of SEQ ID No 1999 (ScPv from the anti-PSMA antibody J591 (see WO2004/098535), PD1 hinge and transmembrane domain) and an intracellular domain selected from the sequences listed in Table 10. A CAR comprising only SEQ ID No 1999 (no inhibitory intracellular domain) was used as control (OPD1).

TABLE 10

| N-CAR NAME | Intracelullar domain |
|---|---|
| PD1 | CSRAARGTIGARRTGQPLKEDPSAVPVFSVDYGELDFQWREKTPEPPVPC |
| | VPEQTEYATIVFPSGMGTSSPARRGSADGPRSAQPLRPEDGHCSWPL |
| | (SEQ ID No 2000) |
| BTLA | RRHQGKQNELSDTAGREINLVDAHLKSEQTEASTRQNSQVLLSETGIYDND |
| | PDLCFRMQEGSEVYSNPCLEENKPGIVYASLNHSVIGPNSRLARNVKEAPT |
| | EYASICVRS (SEQ ID No 2001) |
| CD244 | WRRKRKEKQSETSPKEFLTIYEDVKDLKTRRNHEQEQTFPGGGSTIYSMIQ |
| | SQSSAPTSQEPAYTLYSLIQPSRKSGSRKRNHSPSFNSTIYEVIGKSQPKAQ |
| | NPARLSRKELENFDVYS (SEQ ID No 2002) |
| PD1-CTLA4 | CSRAARGTIGARRTGQPLKEDPSAVPVFSVDYGELDFQWREKTPEPPVPC |
| | VPEQTEYATIVFPSGMGTSSPARRGSADGPRSAQPLRPEDGHCSWPLAVS |
| | LSKMLKKRSPLTTGVYVKMPPTEPECEKQFQPYFIPIN (SEQ ID No 2003) |
| PD1-LAG3 | CSRAARGTIGARRTGQPLKEDPSAVPVFSVDYGELDFQWREKTPEPPVPC |
| | VPEQTEYATIVFPSGMGTSSPARRGSADGPRSAQPLRPEDGHCSWPLHL |
| | WRRQWRPRRFSALEQGIHPPQAQSKIEELEQEPEPEPEPEPEPEPEPEPE |
| | QL (SEQ ID No 2004) |
| PD1-PD1 | CSRAARGTIGARRTGQPLKEDPSAVPVFSVDYGELDFQWREKTPEPPVPC |
| | VPEQTEYATIVFPSGMGTSSPARRGSADGPRSAQPLRPEDGHCSWPLCS |
| | RAARGTIGARRTGQPLKEDPSAVPVFSVDYGELDFQWREKTPEPPVPCVP |
| | EQTEYATIVFPSGMGTSSPARRGSADGPRSAQPLRPEDGHCSWPL (SEQ |
| | ID No 2005) |
| PD1-TIM3 | CSRAARGTIGARRTGQPLKEDPSAVPVFSVDYGELDFQWREKTPEPPVPC |
| | VPEQTEYATIVFPSGMGTSSPARRGSADGPRSAQPLRPEDGHCSWPLFK |
| | WYSHSKEKIQNLSLISLANLPPSGLANAVAEGIRSEENIYTIEENVYEVEEPN |
| | EYYCYVSSRQQPSQPLGCRFAMP (SEQ ID No 2006) |
| CD300LF | WRMMKYQQKAAGMSPEQVLQPLEGDLCYADLTLQLAGTSPQKATTKLSS |
| | AQVDQVEVEYVTMASLPKEDISYASLTLGAEDQEPTYCNMGHLSSHLPGR |
| | GPEEPTEYSTISRP (SEQ ID No 2007) |
| LY9 | KRKGRCSVPAFCSSQAEAPADTPEPTAGHTLYSVLSQGYEKLDTPLRPAR |
| | QQPTPTSDSSSDSNLTTEEDEDRPEVHKPISGRYEVFDQVTQEGAGHDPA |
| | PEGQADYDPVTPYVTEVESVVGENTMYAQVFNLQGKTPVSQKEESSATIY |
| | CSIRKPQVVPPPQQNDLEIPESPTYENFT (SEQ ID No 2008) |
| PECAM | KCYFLRKAKAKQMPVEMSRPAVPLLNSNNEKMSDPNMEANSHYGHNDDV |
| | RNHAMKPINDNKEPLNSDVQYTEVQVSSAESHKDLGKKDTETVYSEVRKA |
| | VPDAVESRYSRTEGSLDGT (SEQ ID No 2009) |
| SIGLEC9 | VRSCRKKSARPAAGVGDTGIEDANAVRGSASQGPLTEPWAEDSPPDQPP |
| | PASARSSVGEGELQYASLSFQMVKPWDSRGQEATDTEYSEIKIHR (SEQ |
| | ID No 2010) |
| SIRPA | RIRQKKAQGSTSSTRLHEPEKNAREITQDTNDITYADLNLPKGKKPAPQAAE |
| | PNNHTEYASIQTSPQPASEDTLTYADLDMVHLNRTPKQPAPKPEPSFSEYA |
| | SVQVPRK (SEQ ID No 2011) |
| PD1-L2-ITSM | CSRAARGTIGARRTGQPLKEDPSAVPVFSVDYGELDFQWREKTPEPPVPC |
| | VPEQTEYATIDFQWREKTPEPPVPCVPEQTEYATIVFPSGMGTSSPARRGS |
| | ADGPRSAQPLRPEDGHCSWPL (SEQ ID No 2012) |
| PD1-L2-ITSM- | CSRAARGTIGARRTGQPLKEDPSAVPVFSVDYGELDFQWREKTPEPPVPC |
| L2-ITSM | VPEQTEYATIDFQWREKTPEPPVPCVPEQTEYATIDFQWREKTPEPPVPCV |
| | PEQTEYATIVFPSGMGTSSPARRGSADGPRSAQPLRPEDGHCSWPL (SEQ |
| | ID No 2013) |
| PD1 (ITSM mut | CSRAARGTIGARRTGQPLKEDPSAVPVFSVDYGELDFQWREKTPEPPVPC |
| 1) | VPEQTEYSEIVFPSGMGTSSPARRGSADGPRSAQPLRPEDGHCSWPL |
| | (SEQ ID No 2014) |
| PD1 (ITSM mut | CSRAARGTIGARRTGQPLKEDPSAVPVFSVDYGELDFQWREKTPEPPVPC |
| 2) | VPEQTEYSEVVFPSGMGTSSPARRGSADGPRSAQPLRPEDGHCSWPL |
| | (SEQ ID No 2015) |
| PD1 (ITSM | CSRAARGTIGARRTGQPLKEDPSAVPVFSVDYGELDFQWREKTPEPPVPC |
| mut3) | VPEQTEYASIVFPSGMGTSSPARRGSADGPRSAQPLRPEDGHCSWPL |
| | (SEQ ID No 2016) |
| PD1-KIR2DL2 | CSRAARGTIGARRTGQPLKEDPSAVPVFSVDYGELDFQWREKTPEPPVPC |
| | VPEQTEYATIVFPSGMGTSSPARRGSADGPRSAQPLRPEDGHCSWPLHR |
| | WCSNKKNAAVMDQESAGNRTANSEDSDEQDPQEVTYTQLNHCVFTQRKI |
| | TRPSQRPKTPPTDIIVYAELPNAESRSKVVSCP (SEQ ID No 2017) |

[0399] Three days after transduction, Jurkat cells were placed into antibiotic selection media to select for pools of stable CAR-expressing clones.

[0400] Dual cell surface expression of P-CAR1 (Table 9) and N-CARs listed in Table 10 assessed by multicolor flow cytometry in transduced NFAT-luciferase reporter Jurkat cells is shown in FIGS. 1 and 2. Dual cell surface expression of P-CAR1 (Table 9) and N-CARs listed in Table 10 assessed by multicolor flow cytometry in transduced NFkB-luciferase reporter Jurkat cells is shown in FIGS. 3 and 4. Dual cell surface expression of P-CAR2 (Table 9) and N-CARs listed in Table 10 assessed by multicolor flow cytometry in transduced NFAT-luciferase reporter Jurkat cells is shown in FIGS. 6 and 7. Dual cell surface expression of P-CAR2 and N-CARs listed in Table 10 assessed by multicolor flow cytometry in transduced NFkB-luciferase reporter Jurkat cells is shown in FIGS. 8 and 9.

[0401] Cells were sequentially transduced with P-CAR and N-CAR lentivirus, and selected for antibiotic-resistant clones after each transduction. Intracellular domains of the various N-CARs are shown above each dot plot. P-CAR expression was detected using a recombinant human CD19-mouse IgG Fc fusion protein followed by APC-conjugated F(ab′)2 goat anti-mouse Fcγ (shown on x axis), and N-CAR expression was detected with a biotinylated recombinant human PSMA-human IgG1 Fc fusion protein followed by PE-conjugated streptavidin (y axis).

### In Vitro T Cell Activation Assay

[0402] For coculture assays, effector Jurkat cells expressing different combinations of P- and N-CARs were cocultured with AAPCs expressing either CD19 (on-target), both CD19 and PSMA (off-target), or neither antigen (empty vector transduced). AAPC target cells were plated at a density of 20,000 cells per well in tissue culture-treated flat-bottom white 96-well plates (Corning COSTAR). Plates were incubated at 37° C. in 5% CO₂ for 24 hours, after which time media was removed and 100,000 Control ΔPD1- or test N-CAR-transduced luciferase reporter Jurkat cells expressing P-CAR1 or P-CAR2 were added to each well in a volume of 100 uL. After a 16-hour incubation at 37° C., 100 uL Bright-Glo luciferase substrate (Promega) was added per well, plates were shaken for 2 minutes, and relative luciferase units (RLU) quantified on a Perkin Elmer EnVision Multilabel Reader. Each Jurkat cell line was tested in sextuplicate and results presented as a ratio of the mean RLU value from coculture with off-target AAPCs to the mean RLU from coculture with target AAPCs.

[0403] FIGS. 5A, 5B and 5C show the inhibitory effect of various N-CARs on P-CAR1 induced T cell activation. Control ΔPD1- or test N-CAR-transduced luciferase reporter Jurkat cells expressing P-CAR1 were incubated with either CD19-expressing AAPCs or dual CD19+PSMA-expressing AAPCs, and luciferase activity was assessed 16 h later. Data are expressed as a ratio of the mean RLU from co-culture with CD19+PSMA AAPCs/CD19 AAPCs. n=6 replicates per sample; data shown are the means+SEM. FIGS. 5A/5C and 5B show results using NFAT-luciferase reporter and NFkB-luciferase reporter Jurkat cells, respectively.

[0404] FIGS. 10A and 10B show the inhibitory effect of various N-CARs on P-CAR2 induced T cell activation. Control ΔPD1- or test N-CAR-transduced luciferase reporter Jurkat cells expressing P-CAR2 were incubated with either CD19-expressing or dual PSMA/CD19-expressing AAPCs, and luciferase activity was assessed 16 h later. Data are expressed as a ratio of the mean RLU from co-culture with CD19+PSMA AAPCs/CD19 AAPCs. n=6 replicates per sample; data shown are the means+SEM. FIGS. 10A and 10B show results using NFAT-luciferase reporter and NFkB-luciferase reporter Jurkat cells, respectively.

### Example 4—Activity of P-CAR⁺/N-CAR⁺T-Cells in Primary Human T-Cells

[0405] The N-CAR designed according to example 2 are also optionally tested in primary human T-cells to ensure that the results from example 3 obtained with Jurkat T-cells translate to primary cells. This can be done by first transducing N-CAR constructs into primary human T-cells obtained according to methods known to the skilled person and monitoring the attenuation of T-cell activation by anti-CD3/CD28 stimulation in the absence and presence of N-CAR antigen. In addition, the P-CAR and N-CAR constructs disclosed in example 3 can also be transduced into primary human T-cells and tested on CD19, PSMA, and CD19/PSMA cells.

### Example 5—Activity of T-Cells Comprising P-CAR and N-CAR in Xenograft Studies

[0406] P-CAR and N-CAR constructs as disclosed in Example 3 can be transduced into primary human T-cells and tested for efficacy in xenograft studies in NSG animals transplanted with tumors expressing, either only CD19 or both CD19 and PSMA. NSG mice are transplanted with luciferase labeled 10⁵-10⁶ cells expressing either CD19 or CD19 and PSMA. A few days after engraftment, these animals are infused with 10⁴-10⁶ P-CAR⁺/N-CAR⁺T-cells intravenously. The animals are dosed with luciferin prior to imaging on the IVIS imaging system routinely to monitor tumor load.

[0407] The invention is further illustrated by the following embodiments:
[0408] 1. An inhibitory chimeric antigen receptor (N-CAR) comprising
[0409] an extracellular domain comprising an antigen binding domain,
[0410] a transmembrane domain,
[0411] an intracellular domain, and,
[0412] wherein the intracellular domain comprises an Immunoreceptor Tyrosine-based Switch Motif ITSM, wherein said ITSM is a sequence of amino acid TX₁YX₂X₃X₄, wherein
[0413] X₁ is an amino acid
[0414] X₂ is an amino acid
[0415] X₃ is an amino acid and
[0416] X₄ is V or I.
[0417] 2. The N-CAR according to embodiment 1, wherein when the extracellular domain is a scFv against PSMA, then the intracellular domain is not the intracellular domain of human PD-1.
[0418] 3. The N-CAR according to embodiment 1 or 2, wherein the extracellular domain does not bind to PMSA.
[0419] 4. The N-CAR according to any one of embodiments 1 to 3, wherein the intracellular domain does not comprise the full intracellular domain of PD-1.
[0420] 5. The N-CAR according to any one of embodiments 1 to 4, wherein ITSM motif is not TEYATI.
[0421] 5.1 The N-CAR according to any one of embodiments 1 to 5, wherein the intracellular domain is not the intracellular domain of human PD1.
[0422] 5.2 The N-CAR according to any one of embodiments 1 to 5, wherein the intracellular domain is not the intracellular domain of human BTLA.
[0423] 5.3 The N-CAR according to any one of embodiments 1 to 5, wherein the intracellular domain is not the intracellular domain of human CD244.
[0424] 5.4 The N-CAR according to any one of embodiments 1 to 5, wherein the intracellular domain is not SEQ ID No 2000, SEQ ID No 2001 or SEQ ID No 2002.
[0425] 6. The N-CAR according to any one of embodiments 1 to 5.4, wherein the intracellular domain comprises the sequence
[0426] ((L1-ITIM-L2)ⁿ-(L3-ITSM-LA)^{m})^{p}, wherein
[0427] n is 0, 1 or an integer greater than 1;
[0428] m is 1 or an integer greater than 1;
[0429] p is 1 or an integer greater than 1;
[0430] L1 is absent or comprises one or more, preferably one, sequences selected from the group consisting of:
   [0431] (a) a naturally occurring N-terminal flanking region of an ITIM only intracellular domains or a fragment thereof;
   [0432] (b) a naturally occurring N-terminal flanking region of an ITIM.*ITSM intracellular domains or a fragment thereof;
   [0433] (c) a naturally occurring intracellular domain from a known inhibitory receptor, wherein the said intracellular domain is N-terminally flanking to a sequence in (c) above, or a fragment thereof; and,
   [0434] (d) a non-naturally occurring sequence comprising between 1 and 500 amino acids;
[0435] each of L2 and L3 is absent or comprises one or more, preferably one, sequences selected from the group consisting of:
   [0436] (e) a naturally occurring C-terminal flanking region of an ITIM only intracellular domain or a fragment thereof;
   [0437] (f) a naturally occurring N-terminal flanking region of an ITSM only intracellular domain or a fragment thereof;
   [0438] (g) a naturally occurring intracellular domain between ITIM and ITSM from proteins that have ITIM.*ITSM motif or a fragment thereof;
   [0439] (h) a naturally occurring intracellular domain from a known inhibitory receptor wherein the said intracellular domain is N-terminally flanking to a sequence in (f) or (g) above, or a fragment thereof; and
   [0440] (i) a non-naturally occurring sequence comprising between 1 and 500 amino acids; and
[0441] L4 is absent or comprises one or more, preferably one, sequences selected from the group consisting of:
   [0442] (j) a naturally occurring C-terminal flanking region of an ITIM.*ITSM intracellular domain or a fragment thereof;
   [0443] (k) a naturally occurring C-terminal flanking region of an ITSM only intracellular domain or a fragment thereof;
   [0444] (l) a naturally occurring intracellular domain from a known inhibitory receptor wherein the said intracellular domain is C-terminally flanking to a sequence in (j) or (k) above; or a fragment thereof and
   [0445] (m) a non-naturally occurring sequence comprising between 1 and 500 amino acids,
[0446] the ITIM is the sequence X₅X₆YX₇X₈X₉, wherein
[0447] X₅ is S, V, I or L,
[0448] X₆ is an amino acid,
[0449] X₇ is an amino acid,
[0450] X₈ is an amino acid, and,
[0451] X₉ is V, I or L, and
[0452] the ITSM is the sequence TX₁YX₂X₃X₄, wherein
[0453] X₁ is an amino acid,
[0454] X₂ is an amino acid,
[0455] X₃ is an amino acid, and,
[0456] X₄ is V or I,
[0457] or a variant thereof.
[0458] 7. The N-CAR according to embodiment 6, wherein
[0459] L1 is absent or comprises one or more, preferably one, sequences selected from the group consisting of:
   [0460] (a) a naturally occurring N-terminal flanking region of ITIM only intracellular domains selected from the sequences shown in Table 3 or a fragment thereof;
   [0461] (b) a naturally occurring N-terminal flanking region of ITIM.*ITSM intracellular selected from the sequences shown in Table 1 or a fragment thereof;
   [0462] (c) a naturally occurring intracellular domain from a known inhibitory receptor selected from the sequences shown in Table 2 or a fragment thereof, wherein said intracellular domain is N-terminally flanking to a sequence in (b) above, or a fragment thereof; and
   [0463] (d) a non-naturally occurring sequence comprising between 1 and 500 amino acids;
[0464] each of L2 and L3 is absent or comprises one or more, preferably one, sequences selected from the group consisting of:
   [0465] (e) a naturally occurring C-terminal flanking region of ITIM only intracellular domains selected from the sequences shown in Table 4 or a fragment thereof;
   [0466] (f) a naturally occurring N-terminal flanking region of ITSM only intracellular domains selected from the sequences shown in Table 6, or a fragment thereof;
   [0467] (g) a naturally occurring intracellular domain between ITIM and ITSM from proteins that have ITIM.*ITSM motif selected from the sequences shown in Table 5, or a fragment thereof;
   [0468] (h) a naturally occurring intracellular domain from a known inhibitory receptor selected from the sequences shown in Table 2 or a fragment thereof wherein said intracellular domain is N-terminally flanking to a sequence in (f) or (g) above, or a fragment thereof; and
   [0469] (i) a non-naturally occurring sequence comprising between 1 and 500 amino acids; and
[0470] L4 is absent or comprises one or more, preferably one, sequences selected from the group consisting of:
   [0471] (j) a naturally occurring C-terminal flanking region of ITIM.*ITSM intracellular domains selected from the sequences shown in Table 7, or a fragment thereof;
   [0472] (k) a naturally occurring C-terminal flanking region of ITSM only intracellular domains selected from the sequences shown in Table 8, or a fragment thereof;
   [0473] (l) a naturally occurring intracellular domain from a known inhibitory receptor selected from the sequences shown in Table 2 or a fragment thereof wherein said intracellular domain is C-terminally flanking to a sequence in (1) above, or a fragment thereof; and,
   [0474] (m) a non-naturally occurring sequence comprising between 1 and 500 amino acids.
[0475] 8. The N-CAR according to embodiment 6 or 7 wherein the intracellular domain comprises the sequence (L1-ITIM-L2-L3-ITSM-L4)^{p} wherein
[0476] p is 1, 2, 3, 4 or 5;
[0477] L1 is a naturally occurring N-terminal flanking region of an ITIM only intracellular domain or a fragment thereof such as, for example, any of the sequences shown in Table 3 or a fragment thereof;
[0478] L2 is absent;
[0479] L3 is a naturally occurring a naturally occurring intracellular domain between ITIM and ITSM from proteins that have ITIM.*ITSM motif or a fragment thereof such as, for example, any of the sequences shown in Table 5 or a fragment thereof;
[0480] L4 is a naturally occurring C-terminal flanking region of an ITIM.*ITSM intracellular domain or a fragment thereof such as, for example, any of the sequences shown in Table 7 or a fragment thereof; or a naturally occurring C-terminal flanking region of an ITSM only intracellular domain such as, for example, any of the sequences shown in Table 8 or a fragment thereof.
[0481] 9. The N-CAR according to any one of embodiments 6 to 8 wherein L1 is absent or comprises one or more, preferably one, sequences or selected from the group consisting of:
   [0482] (a) a naturally occurring N-terminal flanking region of ITIM only intracellular domains selected from

YKMYGSEMLHKRDPLDEDEDTD
DHWALTQRTARAVSPQSTKPMAES
CSRAARGTIGARRTGQPLKEDPSAVPVFS
HRQNQIKQGPPRSKDEEQKPQQRPDLAVDVLERTADKATVNGLPEKDRET
DTSALAAGSSQE
KTHRRKAARTAVGRNDTHPTTGSASPKHQKKSKLHGPTETSSCSGAAPTV
EMDEE
LTRKKKALRIHSVEGDLRRKSAGQEEWSPSAPSPPGSCVQAEAAPAGLCG
EQRGEDCAELHDYFNV
KCYFLRKAKAKQMPVEMSRPAVPLLNSNNEKMSDPNMEANSHYGHNDDVR
NHAMKPINDNKEPLNSD
RRHQGKQNELSDTAGREINLVDAHLKSEQTEASTRQNSQVLLSETGIYDN
DPDLCFRMQEGSEVYSNPCLEENKPG
WRMMKYQQKAAGMSPEQVLQPLEGDLCYADLTLQLAGTSPQKATTKLSSA
QVDQVEVEYVTMASLPKED
KRVQETKFGNAFTEEDSELVVNYIAKKSFCRRAIELTLHSLGVSEELQNK
LEDVVIDRNLLILGKILGEGEFGSVMEGNLKQEDGTSLKVAVKTMKLDNS
SQREIEEFLSEAACMKDFSHPNVIRLLGVCIEMSSQGIPKPMVILPFMKY
GDLHTY

[0483] (b) a naturally occurring N-terminal flanking region of ITIM.*ITSM intracellular domains selected from

YKMYGSEMLHKRDPLDEDEDTD
WRMMKYQQKAAGMSPEQVLQPLEGD
CSRAARGTIGARRTGQPLKEDPSAVPVFS
RIRQKKAQGSTSSTRLHEPEKNAREITQDTND
KTHRRKAARTAVGRNDTHPTTGSASPKHQKKSKLHGPTETSSCSGAAPTV
EMDEE
KCYFLRKAKAKQMPVEMSRPAVPLLNSNNEKMSDPNMEANSHYGHNDDVR
NHAMKPINDNKEPLNSD
RRHQGKQNELSDTAGREINLVDAHLKSEQTEASTRQNSQVLLSETGIYDN
DPDLCFRMQEGSEVYSNPCLEENKPG
KRVQETKFGNAFTEEDSELVVNYIAKKSFCRRAIELTLHSLGVSEELQNK
LEDVVIDRNLLILGKILGEGEFGSVMEGNLKQEDGTSLKVAVKTMKLDNS
SQREIEEFLSEAACMKDFSHPNVIRLLGVCIEMSSQGIPKPMVILPFMKY
GDLHTY

[0484] (c) a naturally occurring intracellular domain from a known inhibitory receptor selected from the sequences shown in table 2, wherein said intracellular domain is N-terminally flanking to a sequence in (b) above; and
[0485] (d) a non-naturally occurring sequence comprising between 1 and 500 amino acids.
[0486] 10. A N-CAR according to any one of embodiments 6 to 9 wherein each of L2 and L3 is absent or comprises one or more, preferably one, sequences selected from the group consisting of:
   [0487] (e) a naturally occurring C-terminal flanking region of ITIM only intracellular domains selected from;

GNCSFFTETG
NFHGMNPSKDTSTEYSEVRTQ
KEEEMADTSYGTVKAENIIMMETAQTSL
NHSVIGPNSRLARNVKEAPTEYASICVRS
DHWALTQRTARAVSPQSTKPMAESITYAAVARH
QVSSAESHKDLGKKDTETVYSEVRKAVPDAVESRYSRTEGSLDGT
DFQWREKTPEPPVPCVPEQTEYATIVFPSGMGTSSPARRGSADGPRSAQP
LRPEDGHCSWPL
NLPKGKKPAPQAAEPNNHTEYASIQTSPQPASEDTLTYADLDMVHLNRTP
KQPAPKPEPSFSEYASVQVPRK
TLQLAGTSPQKATTKLSSAQVDQVEVEYVTMASLPKEDISYASLTLGAED
QEPTYCNMGHLSSHLPGRGPEEPTEYSTISRP
ETGPKHIPLQTLLKFMVDIALGMEYLSNRNFLHRDLAARNCMLRDDMTVC
VADFGLSKKIYSGDYYRQGRIAKMPVKWIAIESLADRVYTSKSDVWAFGV
TMWEIATRGMTPYPGVQNHEMYDYLLHGHRLKQPEDCLDELYEIMYSCWR
TDPLDRPTFSVLRLQLEKLLESLPDVRNQADVIYVNTQLLESSEGLAQGS
TLAPLDLNIDPDSIIASCTPRAAISVVTAEVHDSKPHEGRYILNGGSEEW
EDLTSAPSAAVTAEKNSVLPGERLVRNGVSWSHSSMLPLGSSLPDELLFA
DDSSEGSEVLM

[0488] (f) a naturally occurring N-terminal flanking region of ITSM only intracellular domains selected from;

YKMYGSEMLHKRDPLDEDEDTDISYKKLKEEEMAD
CSRAARGTIGARRTGQPLKEDPSAVPVFSVDYGELDFQWREKTPEPPVPC
VPEQ
RIRQKKAQGSTSSTRLHEPEKNAREITQDTNDITYADLNLPKGKKPAPQA
AEPNNH
KTHRRKAARTAVGRNDTHPTTGSASPKHQKKSKLHGPTETSSCSGAAPTV
EMDEELHYASLNFHGMNPSKDTS
KCYFLRKAKAKQMPVEMSRPAVPLLNSNNEKMSDPNMEANSHYGHNDDVR
NHAMKPINDNKEPLNSDVQYTEVQVSSAESHKDLGKKDTE
RRHQGKQNELSDTAGREINLVDAHLKSEQTEASTRQNSQVLLSETGIYDN
DPDLCFRMQEGSEVYSNPCLEENKPGIVYASLNHSVIGPNSRLARNVKEA
P
WRMMKYQQKAAGMSPEQVLQPLEGDLCYADLTLQLAGTSPQKATTKLSSA
QVDQVEVEYVTMASLPKEDISYASLTLGAEDQEPTYCNMGHLSSHLPGRG
PEEP
WRRKRKEKQSETSPKEFLTIYEDVKDLKTRRNHEQEQTFPGGGSTIYSMI
QSQSSAPTSQEPAYTLYSLIQPSRKSGSRKRNHSPSFNS
VRSCRKKSARPAAGVGDTGIEDANAVRGSASQGPLTEPWAEDSPPDQPPP
ASARSSVGEGELQYASLSFQMVKPWDSRGQEATD
NKCGRRNKFGINRPAVLAPEDGLAMSLHFMTLGGSSLSPTEGKGSGLQGH
IIENPQYFSDACVHHIKRRDIVLKWELGEGAFGKVFLAECHNLLPEQDKM
LVAVKALKEASESARQDFQREAELLTMLQHQHIVRFFGVCTEGRPLLMVF
EYMRHGDLNRFLRSHGPDAKLLAGGEDVAPGPLGLGQLLAVASQVAAGMV
YLAGLHFVHRDLATRNCLVGQGLVVKIGDFGMSRDIYS
KLARHSKFGMKGPASVISNDDDSASPLHHISNGSNTPSSSEGGPDAVIIG
MTKIPVIENPQYFGITNSQLKPDTFVQHIKRHNIVLKRELGEGAFGKVFL
AECYNLCPEQDKILVAVKTLKDASDNARKDFHREAELLTNLQHEHIVKFY
GVCVEGDPLIMVFEYMKHGDLNKFLRAHGPDAVLMAEGNPPTELTQSQML
HIAQQIAAGMVYLASQHFVHRDLATRNCLVGENLLVKIGDFGMSRDVYS
KRKGRCSVPAFCSSQAEAPADTPEPTAGHTLYSVLSQGYEKLDTPLRPAR
QQPTPTSDSSSDSNLTTEEDEDRPEVHKPISGRYEVFDQVTQEGAGHDPA
PEGQADYDPVTPYVTEVESVVGENTMYAQVFNLQGKTPVSQKEESSA
KRVQETKFGNAFTEEDSELVVNYIAKKSFCRRAIELTLHSLGVSEELQNK
LEDVVIDRNLLILGKILGEGEFGSVMEGNLKQEDGTSLKVAVKTMKLDNS
SQREIEEFLSEAACMKDFSHPNVIRLLGVCIEMSSQGIPKPMVILPFMKY
GDLHTYLLYSRLETGPKHIPLQTLLKFMVDIALGMEYLSNRNFLHRDLAA
RNCMLRDDMTVCVADFGLSKKIYSGDYYRQGRIAKMPVKWIAIESLADRV
YTSKSDVWAFGVTMWEIATRGM

[0489] (g) a naturally occurring intracellular domain between ITIM and ITSM from proteins that have ITIM.*ITSM motif selected from;

KEEEMAD
NFHGMNPSKDTS
QVSSAESHKDLGKKDTE
NLPKGKKPAPQAAEPNNH
NHSVIGPNSRLARNVKEAP
DFQWREKTPEPPVPCVPEQ
TLQLAGTSPQKATTKLSSAQVDQVEVEYVTMASLPKEDISYASLTLGAED
QEPTYCNMGHLSSHLPGRGPEEP
ETGPKHIPLQTLLKFMVDIALGMEYLSNRNFLHRDLAARNCMLRDDMTVC
VADFGLSKKIYSGDYYRQGRIAKMPVKWIAIESLADRVYTSKSDVWAFGV
TMWEIATRGM

[0490] (h) a naturally occurring intracellular domain from known inhibitory receptors selected from the sequences shown in table 2 wherein said intracellular domain is N-terminally flanking to a sequence in (f) or (g) above; and
[0491] (i) a non-naturally occurring sequence comprising between 1 and 500 amino acids; and
[0492] 11. The N-CAR according to according to any one of embodiments 6 to 10 wherein LA is absent or comprises one or more, preferably one, sequences selected from the group consisting of:
   [0493] (j) a naturally occurring C-terminal flanking region of ITIM.*ITSM intracellular domains selected from:

SRP
RTQ
CVRS
KAENIIMMETAQTSL
RKAVPDAVESRYSRTEGSLDGT
VFPSGMGTSSPARRGSADGPRSAQPLRPEDGHCSWPL
QTSPQPASEDTLTYADLDMVHLNRTPKQPAPKPEPSFSEYASVQVPRK
QNHEMYDYLLHGHRLKQPEDCLDELYEIMYSCWRTDPLDRPTFSVLRLQL
EKLLESLPDVRNQADVIYVNTQLLESSEGLAQGSTLAPLDLNIDPDSIIA
SCTPRAAISVVTAEVHDSKPHEGRYILNGGSEEWEDLTSAPSAAVTAEKN
SVLPGERLVRNGVSWSHSSMLPLGSSLPDELLFADDSSEGSEVLM

[0494] (k) a naturally occurring C-terminal flanking region of ITSM only intracellular domain selected from:

RTQ
SRP
KIHR
CVRS
KAENIIMMETAQTSL
RKAVPDAVESRYSRTEGSLDGT
RKPQVVPPPQQNDLEIPESPTYENFT
GKSQPKAQNPARLSRKELENFDVYS
VFPSGMGTSSPARRGSADGPRSAQPLRPEDGHCSWPL
QTSPQPASEDTLTYADLDMVHLNRTPKQPAPKPEPSFSEYASVQVPRK
FNLQGKTPVSQKEESSATIYCSIRKPQVVPPPQQNDLEIPESPTYENFT
GGRTMLPIRWMPPESILYRKFTTESDVWSFGVVLWEIFTYGKQPWYQLSN
TEAIDCITQGRELERPRACPPEVYAIMRGCWQREPQQRHSIKDVHARLQA
LAQAPPVYLDVLG
GGHTMLPIRWMPPESIMYRKFTTESDVWSLGVVLWEIFTYGKQPWYQLSN
NEVIECITQGRVLQRPRTCPQEVYELMLGCWQREPHMRKNIKGIHTLLQN
LAKASPVYLDILG
QNHEMYDYLLHGHRLKQPEDCLDELYEIMYSCWRTDPLDRPTFSVLRLQL
EKLLESLPDVRNQADVIYVNTQLLESSEGLAQGSTLAPLDLNIDPDSIIA
SCTPRAAISVVTAEVHDSKPHEGRYILNGGSEEWEDLTSAPSAAVTAEKN
SVLPGERLVRNGVSWSHSSMLPLGSSLPDELLFADDSSEGSEVLM
KDLKTRRNHEQEQTFPGGGSTIYSMIQSQSSAPTSQEPAYTLYSLIQPSR
KSGSRKRNHSPSFNSTIYEVIGKSQPKAQNPARLSRKELENFDVYS

[0495] (l) a naturally occurring intracellular domain from a known inhibitory receptor selected from the sequences shown in table 2 wherein said intracellular domain is C-terminally flanking to a sequence in (j) or (k) above; and
[0496] (m) a non-naturally occurring sequence comprising between 1 and 500 amino acids.
[0497] 11.1. The N-CAR according to embodiment 6 wherein the intracellular domain comprises the following sequence:
[0498] ((L1-ITIM-L2)ⁿ-(L3-ITSM-L4) m) P, wherein
[0499] n is 0;
[0500] m is 1;
[0501] p is 1;
[0502] L3 comprises one sequence selected from
   [0503] (f) a naturally occurring N-terminal flanking region of an ITSM only intracellular domain such as, for example, any of the sequences shown in Table 6 below or a fragment thereof; or,
   [0504] (i) a non-naturally occurring sequence comprising between 1 and 500 amino acids;
[0505] and
[0506] L4 comprises one or more, preferably one or two, sequences selected from the group consisting of:
   [0507] (k) a naturally occurring C-terminal flanking region of an ITSM only intracellular domain such as, for example, any of the sequences shown in Table 8 below or a fragment thereof;
   [0508] (l) a naturally occurring intracellular domain from a known inhibitory receptor such as any of the sequences shown in table 2 or a fragment thereof wherein said intracellular domain is C-terminally flanking to a sequence in (k) above; and
   [0509] (m) a non-naturally occurring sequence comprising between 1 and 500 amino acids, and, wherein.
[0510] 11.2. The N-CAR according to embodiment 6 wherein the intracellular domain comprises the following sequence:
[0511] ((L1-ITIM-L2)ⁿ-(L3-ITSM-L4)^{m})^{p}, wherein
[0512] n is 0;
[0513] m is 1;
[0514] p is 1;
[0515] L3 is selected from

YKMYGSEMLHKRDPLDEDEDTDISYKKLKEEEMAD
CSRAARGTIGARRTGQPLKEDPSAVPVFSVDYGELDFQWREKTPEPPVPC
VPEQ
RIRQKKAQGSTSSTRLHEPEKNAREITQDTNDITYADLNLPKGKKPAPQA
AEPNNH
KTHRRKAARTAVGRNDTHPTTGSASPKHQKKSKLHGPTETSSCSGAAPTV
EMDEELHYASLNFHGMNPSKDTS
KCYFLRKAKAKQMPVEMSRPAVPLLNSNNEKMSDPNMEANSHYGHNDDVR
NHAMKPINDNKEPLNSDVQYTEVQVSSAESHKDLGKKDTE
RRHQGKQNELSDTAGREINLVDAHLKSEQTEASTRQNSQVLLSETGIYDN
DPDLCFRMQEGSEVYSNPCLEENKPGIVYASLNHSVIGPNSRLARNVKEA
P
WRMMKYQQKAAGMSPEQVLQPLEGDLCYADLTLQLAGTSPQKATTKLSSA
QVDQVEVEYVTMASLPKEDISYASLTLGAEDQEPTYCNMGHLSSHLPGRG
PEEP
WRRKRKEKQSETSPKEFLTIYEDVKDLKTRRNHEQEQTFPGGGSTIYSMI
QSQSSAPTSQEPAYTLYSLIQPSRKSGSRKRNHSPSFNS
VRSCRKKSARPAAGVGDTGIEDANAVRGSASQGPLTEPWAEDSPPDQPPP
ASARSSVGEGELQYASLSFQMVKPWDSRGQEATD
NKCGRRNKFGINRPAVLAPEDGLAMSLHFMTLGGSSLSPTEGKGSGLQGH
IIENPQYFSDACVHHIKRRDIVLKWELGEGAFGKVFLAECHNLLPEQDKM
LVAVKALKEASESARQDFQREAELLTMLQHQHIVRFFGVCTEGRPLLMVF
EYMRHGDLNRFLRSHGPDAKLLAGGEDVAPGPLGLGQLLAVASQVAAGMV
YLAGLHFVHRDLATRNCLVGQGLVVKIGDFGMSRDIYS
KLARHSKFGMKGPASVISNDDDSASPLHHISNGSNTPSSSEGGPDAVIIG
MTKIPVIENPQYFGITNSQLKPDTFVQHIKRHNIVLKRELGEGAFGKVFL
AECYNLCPEQDKILVAVKTLKDASDNARKDFHREAELLTNLQHEHIVKFY
GVCVEGDPLIMVFEYMKHGDLNKFLRAHGPDAVLMAEGNPPTELTQSQML
HIAQQIAAGMVYLASQHFVHRDLATRNCLVGENLLVKIGDFGMSRDVYS
KRKGRCSVPAFCSSQAEAPADTPEPTAGHTLYSVLSQGYEKLDTPLRPAR
QQPTPTSDSSSDSNLTTEEDEDRPEVHKPISGRYEVFDQVTQEGAGHDPA
PEGQADYDPVTPYVTEVESVVGENTMYAQVFNLQGKTPVSQKEESSA
KRVQETKFGNAFTEEDSELVVNYIAKKSFCRRAIELTLHSLGVSEELQNK
LEDVVIDRNLLILGKILGEGEFGSVMEGNLKQEDGTSLKVAVKTMKLDNS
SQREIEEFLSEAACMKDFSHPNVIRLLGVCIEMSSQGIPKPMVILPFMKY
GDLHTYLLYSRLETGPKHIPLQTLLKFMVDIALGMEYLSNRNFLHRDLAA
RNCMLRDDMTVCVADFGLSKKIYSGDYYRQGRIAKMPVKWIAIESLADRV
YTSKSDVWAFGVTMWEIATRGM

[0516] and L4 comprises one sequence selected from the group consisting of
[0517] (k)

RTQ
SRP
KIHR
CVRS
KAENIIMMETAQTSL
RKAVPDAVESRYSRTEGSLDGT
RKPQVVPPPQQNDLEIPESPTYENFT
GKSQPKAQNPARLSRKELENFDVYS
VFPSGMGTSSPARRGSADGPRSAQPLRPEDGHCSWPL
QTSPQPASEDTLTYADLDMVHLNRTPKQPAPKPEPSFSEYASVQVPRK
FNLQGKTPVSQKEESSATIYCSIRKPQVVPPPQQNDLEIPESPTYENFT
GGRTMLPIRWMPPESILYRKFTTESDVWSFGVVLWEIFTYGKQPWYQLSN
TEAIDCITQGRELERPRACPPEVYAIMRGCWQREPQQRHSIKDVHARLQA
LAQAPPVYLDVLG
GGHTMLPIRWMPPESIMYRKFTTESDVWSLGVVLWEIFTYGKQPWYQLSN
NEVIECITQGRVLQRPRTCPQEVYELMLGCWQREPHMRKNIKGIHTLLQN
LAKASPVYLDILG
QNHEMYDYLLHGHRLKQPEDCLDELYEIMYSCWRTDPLDRPTFSVLRLQL
EKLLESLPDVRNQADVIYVNTQLLESSEGLAQGSTLAPLDLNIDPDSIIA
SCTPRAAISVVTAEVHDSKPHEGRYILNGGSEEWEDLTSAPSAAVTAEKN
SVLPGERLVRNGVSWSHSSMLPLGSSLPDELLFADDSSEGSEVLM
KDLKTRRNHEQEQTFPGGGSTIYSMIQSQSSAPTSQEPAYTLYSLIQPSR
KSGSRKRNHSPSFNSTIYEVIGKSQPKAQNPARLSRKELENFDVYS

[0518] and optionally
[0519] (l) a naturally occurring intracellular domain from a known inhibitory receptor such as any of the sequences shown in table 2 or a fragment thereof wherein said intracellular domain is C-terminally flanking to a sequence in (k) above.
[0520] 11.3. The N-CAR according to embodiment 6 wherein the intracellular domain comprises the following sequence: ((L1-ITIM-L2)ⁿ-(L3-ITSM-L4) m) P, wherein
[0521] n is 0;
[0522] m is 1;
[0523] p is 1;
[0524] L3 is selected from

CSRAARGTIGARRTGQPLKEDPSAVPVFSVDYGELDFQWREKTPEPPVPC
VPEQ
RIRQKKAQGSTSSTRLHEPEKNAREITQDTNDITYADLNLPKGKKPAPQA
AEPNNH
KCYFLRKAKAKQMPVEMSRPAVPLLNSNNEKMSDPNMEANSHYGHNDDVR
NHAMKPINDNKEPLNSDVQYTEVQVSSAESHKDLGKKDTE
RRHQGKQNELSDTAGREINLVDAHLKSEQTEASTRQNSQVLLSETGIYDN
DPDLCFRMQEGSEVYSNPCLEENKPGIVYASLNHSVIGPNSRLARNVKEA
P
WRMMKYQQKAAGMSPEQVLQPLEGDLCYADLTLQLAGTSPQKATTKLSSA
QVDQVEVEYVTMASLPKEDISYASLTLGAEDQEPTYCNMGHLSSHLPGRG
PEEP
WRRKRKEKQSETSPKEFLTIYEDVKDLKTRRNHEQEQTFPGGGSTIYSMI
QSQSSAPTSQEPAYTLYSLIQPSRKSGSRKRNHSPSFNS
VRSCRKKSARPAAGVGDTGIEDANAVRGSASQGPLTEPWAEDSPPDQPPP
ASARSSVGEGELQYASLSFQMVKPWDSRGQEATD
KRKGRCSVPAFCSSQAEAPADTPEPTAGHTLYSVLSQGYEKLDTPLRPAR
QQPTPTSDSSSDSNLTTEEDEDRPEVHKPISGRYEVFDQVTQEGAGHDPA
PEGQADYDPVTPYVTEVESVVGENTMYAQVFNLQGKTPVSQKEESSA

[0525] L4 comprises one sequence selected from the group consisting of
[0526] (k)

SRP
KIHR
CVRS
RKAVPDAVESRYSRTEGSLDGT
RKPQVVPPPQQNDLEIPESPTYENFT
GKSQPKAQNPARLSRKELENFDVYS
VFPSGMGTSSPARRGSADGPRSAQPLRPEDGHCSWPL
QTSPQPASEDTLTYADLDMVHLNRTPKQPAPKPEPSFSEYASVQVPRK

[0527] and optionally
[0528] (l) a naturally occurring intracellular domain from a known inhibitory receptor selected from the sequences shown in table 2, preferably KIR2DL2, or a fragment thereof wherein said intracellular domain is C-terminally flanking to a sequence in (k) above.
[0529] 11.4. The N-CAR according to embodiment 6 wherein the intracellular domain comprises the following sequence:

[0530] ((L1-ITIM-L2)ⁿ-(L3-ITSM-L4)^{m})^{p}, wherein
[0531] n is 0;
[0532] m is 1;
[0533] p is 1;
[0534] L3 is selected from

CSRAARGTIGARRTGQPLKEDPSAVPVFSVDYGELDFQWREKTPEPPVPC
VPEQ

[0535] and L4 comprises
[0536] (k)

VFPSGMGTSSPARRGSADGPRSAQPLRPEDGHCSWPL

[0537] and
[0538] (l) a naturally occurring intracellular domain from a known inhibitory receptor selected from the sequences shown in table 2, preferably KIR2DL2, or a fragment thereof wherein said intracellular domain is C-terminally flanking to a sequence in (k) above.
[0539] 11.5. The N-CAR according to embodiment 6 wherein the intracellular domain comprises the following sequence:
[0540] ((L1-ITIM-L2)ⁿ-(L3-ITSM-L4)^{m})^{p}, wherein
[0541] n is 0;
[0542] m is 1;
[0543] p is 1;
[0544] L3 is selected from

WRMMKYQQKAAGMSPEQVLQPLEGDLCYADLTLQLAGTSPQKATTKLSSA
QVDQVEVEYVTMASLPKEDISYASLTLGAEDQEPTYCNMGHLSSHLPGRG
PEEP

[0545] L4 comprises a sequence selected from
[0546] (k)

SRP

[0547] and optionally
[0548] (l) a naturally occurring intracellular domain from a known inhibitory receptor selected from the sequences shown in table 2 or a fragment thereof wherein said intracellular domain is C-terminally flanking to a sequence in (k) above.
[0549] 11.6. The N-CAR according to embodiment 6 wherein the intracellular domain comprises the following sequence:
[0550] ((L1-ITIM-L2)ⁿ-(L3-ITSM-L4)^{m})^{p}, wherein
[0551] n is 0;
[0552] m is 1;
[0553] p is 1 or 2;
[0554] L3 comprises one sequence selected from
   [0555] (i) a non-naturally occurring sequence comprising between 1 and 500 amino acids; and
[0556] L4 comprises one or more, preferably one or two, sequences selected from:
   [0557] (m) a non-naturally occurring sequence comprising between 1 and 500 amino acids.
[0558] 11.7. The N-CAR according to embodiment 6 wherein the intracellular domain is selected from SEQ ID No 2000, SEQ ID No 2001, SEQ ID No 2002, SEQ ID No 2003, SEQ ID No 2004, SEQ ID No 2005, SEQ ID No 2006, SEQ ID No 2007, SEQ ID No 2008, SEQ ID No 2009, SEQ ID No 2010, SEQ ID No 2011, SEQ ID No 2012, SEQ ID No 2013, SEQ ID No 2014, SEQ ID No 2015, SEQ ID No 2016 and SEQ ID No 2017.
[0559] 12. The N-CAR according to any one of embodiments 6 to 11.7 wherein the non-naturally occurring sequence of (d), (i) and (m) comprises between 1 and 400, 1 and 300, 1 and 200, 1 and 100, 10 and 100, 10 and 80, 10 and 60, 10 and 40, 100 and 200, 100 and 300 or 100 and 400.
[0560] 13. The N-CAR according to any one of embodiments 6 to 11.7 wherein the non-naturally occurring sequence of (d) or (i) is a Glycine/Serine linker (GlyₓSer)ₙ where x=1, 2, 3, 4 or 5 and n is 1 to 100.
[0561] 14. The N-CAR according to embodiment 13 wherein the non-naturally occurring sequence of (d) or (i) is a Glycine/Serine linker (Gly-Gly-Gly-Ser)ₙ or (Gly-Gly-Gly-Gly-Ser)ₙ, where n is 1 to 100, 1 to 80, 1 to 50, 1 to 20 or 1 to 10.
[0562] 15. The N-CAR according to embodiment 14 wherein the non-naturally occurring sequence of (d) or (i) is a (Gly₄Ser)₄ or (Gly₄Ser)₃.
[0563] 16. The ICAR according to any one of embodiments 6 to 15 wherein the intracellular domain comprises the sequence (L1-ITIM-L2-L3-ITSM-L4) P wherein p is 1, 2, 3, 4 or 5;
[0564] L1 is a naturally occurring N-terminal flanking region of ITIM only intracellular domains selected from the following sequences;

YKMYGSEMLHKRDPLDEDEDTD
DHWALTQRTARAVSPQSTKPMAES
CSRAARGTIGARRTGQPLKEDPSAVPVFS
HRQNQIKQGPPRSKDEEQKPQQRPDLAVDVLERTADKATVNGLPEKDRET
DTSALAAGSSQE
KTHRRKAARTAVGRNDTHPTTGSASPKHQKKSKLHGPTETSSCSGAAPTV
EMDEE
LTRKKKALRIHSVEGDLRRKSAGQEEWSPSAPSPPGSCVQAEAAPAGLCG
EQRGEDCAELHDYFNV
KCYFLRKAKAKQMPVEMSRPAVPLLNSNNEKMSDPNMEANSHYGHNDDVR
NHAMKPINDNKEPLNSD
RRHQGKQNELSDTAGREINLVDAHLKSEQTEASTRQNSQVLLSETGIYDN
DPDLCFRMQEGSEVYSNPCLEENKPG
WRMMKYQQKAAGMSPEQVLQPLEGDLCYADLTLQLAGTSPQKATTKLSSA
QVDQVEVEYVTMASLPKED
KRVQETKFGNAFTEEDSELVVNYIAKKSFCRRAIELTLHSLGVSEELQNK
LEDVVIDRNLLILGKILGEGEFGSVMEGNLKQEDGTSLKVAVKTMKLDNS
SQREIEEFLSEAACMKDFSHPNVIRLLGVCIEMSSQGIPKPMVILPFMKY
GDLHTY

[0565] L2 is absent;
[0566] L3 is a naturally occurring intracellular domain between ITIM and ITSM from proteins that have ITIM.*ITSM motif selected from the following sequences:

KEEEMAD
NFHGMNPSKDTS
QVSSAESHKDLGKKDTE
NLPKGKKPAPQAAEPNNH
NHSVIGPNSRLARNVKEAP
DFQWREKTPEPPVPCVPEQ
TLQLAGTSPQKATTKLSSAQVDQVEVEYVTMASLPKEDISYASLTLGAED
QEPTYCNMGHLSSHLPGRGPEEP
ETGPKHIPLQTLLKFMVDIALGMEYLSNRNFLHRDLAARNCMLRDDMTVC
AVDFGLSKKIYSGDYYRQGRIAKMPVKWIAIESLADRVYTSKSDVWAFGV
TMWEIATRGM

[0567] L4 is a naturally occurring C-terminal flanking region of ITIM.*ITSM intracellular domains selected from the following sequences:

SRP
RTQ
CVRS
KAENIIMMETAQTSL
RKAVPDAVESRYSRTEGSLDGT
VFPSGMGTSSPARRGSADGPRSAQPLRPEDGHCSWPL
QTSPQPASEDTLTYADLDMVHLNRTPKQPAPKPEPSFSEYASVQVPRK
QNHEMYDYLLHGHRLKQPEDCLDELYEIMYSCWRTDPLDRPTFSVLRLQL
EKLLESLPDVRNQADVIYVNTQLLESSEGLAQGSTLAPLDLNIDPDSIIA
SCTPRAAISVVTAEVHDSKPHEGRYILNGGSEEWEDLTSAPSAAVTAEKN
SVLPGERLVRNGVSWSHSSMLPLGSSLPDELLFADDSSEGSEVLM

or a naturally occurring C-terminal flanking region of ITSM only intracellular domains selected from the following sequences:

RTQ
SRP
CVRS
KAENIIMMETAQTSL
RKAVPDAVESRYSRTEGSLDGT
VFPSGMGTSSPARRGSADGPRSAQPLRPEDGHCSWPL
QTSPQPASEDTLTYADLDMVHLNRTPKQPAPKPEPSFSEYASVQVPRK
FNLQGKTPVSQKEESSATIYCSIRKPQVVPPPQQNDLEIPESPTYENFT
GGRTMLPIRWMPPESILYRKFTTESDVWSFGVVLWEIFTYGKQPWYQLSN
TEAIDCITQGRELERPRACPPEVYAIMRGCWQREPQQRHSIKDVHARLQA
LAQAPPVYLDVLG
GGHTMLPIRWMPPESIMYRKFTTESDVWSLGVVLWEIFTYGKQPWYQLSN
NEVIECITQGRVLQRPRTCPQEVYELMLGCWQREPHMRKNIKGIHTLLQN
LAKASPVYLDILG
QNHEMYDYLLHGHRLKQPEDCLDELYEIMYSCWRTDPLDRPTFSVLRLQL
EKLLESLPDVRNQADVIYVNTQLLESSEGLAQGSTLAPLDLNIDPDSIIA
SCTPRAAISVVTAEVHDSKPHEGRYILNGGSEEWEDLTSAPSAAVTAEKN
SVLPGERLVRNGVSWSHSSMLPLGSSLPDELLFADDSSEGSEVLM
KDLKTRRNHEQEQTFPGGGSTIYSMIQSQSSAPTSQEPAYTLYSLIQPSR
KSGSRKRNHSPSFNSTIYEVIGKSQPKAQNPARLSRKELENFDVYS.

[0568] 17. The N-CAR according to any one of the preceding embodiments wherein the term amino acid refers to glycine, alanine, valine, leucine, isoleucine, phenylalanine, proline, serine, threonine, tyrosine, cysteine, methionine, lysine, arginine, histidine, tryptophan, aspartic acid, glutamic acid, asparagine or glutamine.
[0569] 18. The N-CAR according to any one of the preceding embodiments wherein X₁ is E, V or I.
[0570] 19. The N-CAR any one of the preceding embodiments wherein X₁ is E.
[0571] 20. The N-CAR any one of the preceding embodiments wherein X₂ is S or A.
[0572] 21. The N-CAR any one of the preceding embodiments wherein X₂ is A.
[0573] 22. The N-CAR any one of the preceding embodiments wherein X₃ is E, S, T, Q or V.
[0574] 23. The N-CAR any one of the preceding embodiments wherein X₃ is E.
[0575] 24. The N-CAR any one of the preceding embodiments wherein X₃ is T.
[0576] 25. The N-CAR any one of the preceding embodiments wherein X₂ is I.
[0577] 26. The N-CAR according to any one of embodiments 7 to 25 wherein X₅ is L, V or I
[0578] 27. The N-CAR according to any one of embodiments 7 to 26 wherein X₅ is L.
[0579] 28. The N-CAR according to any one of embodiments 7 to 26 wherein X₅ is V
[0580] 29. The N-CAR according to any one of embodiments 7 to 26 wherein X₅ is I.
[0581] 30. The N-CAR according to any one of embodiments 7 to 29 wherein X₆ is A, H, Q, T, D, V, L or E.
[0582] 31. The N-CAR according to any one of embodiments 7 to 30 wherein X₆ is H.
[0583] 32. The N-CAR according to any one of embodiments 7 to 30 wherein X₆ is D.
[0584] 33. The N-CAR according to any one of embodiments 7 to 32 wherein X₇ is A, G, T, V or E.
[0585] 34. The N-CAR according to any one of embodiments 7 to 33 wherein X₇ is A.
[0586] 35. The N-CAR according to any one of embodiments 7 to 33 wherein X₇ is G.
[0587] 36. The N-CAR according to any one of embodiments 7 to 35 wherein X₈ is V, S, D or E.
[0588] 37. The N-CAR according to any one of embodiments 7 to 36 wherein X₈ is S or E.
[0589] 38. The N-CAR according to any one of embodiments 7 to 37 wherein X₈ is E.
[0590] 39. The N-CAR according to any one of embodiments 7 to 38 wherein X₉ is L or V.
[0591] 40. The N-CAR according to any one of embodiments 7 to 38 wherein X₉ is L.
[0592] 41. The N-CAR according to any one of embodiments 7 to 40 wherein X₅ is L or V, X₈ is E and X₉ is L.
[0593] 42. The N-CAR any one of the preceding embodiments wherein the ITSM, or at least one of the ITSMs when several ITSMs are present in the intracellular domain, is selected from TAYELV, TAYGLI, TAYNAV, TCYGLV, TCYPDI, TDYASI, TDYDLV, TDYLSI, TDYQQV, TDYYRV, TEYASI, TEYATI, TEYDTI, TEYPLV, TEYSEI, TEYSEV, TEYSTI, TEYTKV, TFYHVV, TFYLLI, TFYNKI, TFYPDI, TGYEDV, TGYLSI, THYKEI, TIYAQV, TIYAVV, TIYCSI, TIYEDV, TIYERI, TIYEVI, TIYHVI, TIYIGV, TIYLKV, TIYSMI, TIYSTI, TIYTYI, TKYFHI, TKYMEI, TKYQSV, TKYSNI, TKYSTV, TLYASV, TLYAVV, TLYFWV, TLYHLV, TLYPMV, TLYPPI, TLYRDI, TLYRDV, TLYSKI, TLYSLI, TLYSPV, TMYAQV, TMYCQV, TNYKAV, TNYNLV, TPYAGI, TPYPGV, TPYVDI, TQYGRV, TQYNQV, TRYAYV, TRYGEV, TRYHSV, TRYKTI, TRYLAI, TRYMAI, TRYQKI, TRYQQI, TRYSNI, TRYSPI, TSYGTV, TSYMEV, TSYQGV, TSYTTI, TTYRSI, TTYSDV, TTYVTI, TVYAQI, TVYASV, TVYEVI, TVYGDV, TVYKGI, TVYQRV, TVYSEV, TVYSTV, TYYHSI, TYYLQI, or TYYYSV.
[0594] 43. The N-CAR any one of the preceding embodiments wherein the ITSM, or at least one of the ITSMs when several ITSMs are present in the intracellular domain is TEYASI.
[0595] 44. The N-CAR any one of the preceding embodiments wherein the ITSM, or at least one of the ITSMs when several ITSMs are present in the intracellular domain is TEYSEI.
[0596] 44.1 The N-CAR any one of the preceding embodiments wherein the ITSM, or at least one of the ITSMs when several ITSMs are present in the intracellular domain is TEYSTI.
[0597] 45. The N-CAR any one of the preceding embodiments wherein the ITSM, or at least one of the ITSMs when several ITSMs are present in the intracellular domain is TVYSEV.
[0598] 46. The N-CAR according to any one of embodiments 7 to 45 wherein the ITIM, or at least one of the ITIMs when several ITSMs are present in the intracellular domain is selected from LSYRSL, LPYYDL, LPYYDL, LLYSRL, LLYSRL, LIYTLL, LLYADL, ISYTTL, VTYSAL, IHYSEL, VDYVIL, LHYASL, LDYDYL, VDYDFL, VTYSTL, IIYSEV, LEYLCL, VLYGQL, VPYTPL, ISYPML, ISYPML, ISYPML, VSYTNL, LLYEMV, VDYNLV, ITYFAL, VHYQSV, VPYVMV, IPYRTV, IAYSLL, VCYGRL, LKYLYL, LLYEHV, ITYSLL, VLYSEL, IWYNIL, ISYKGL, IDYYNL, LEYLQL, LKYRGL, VLYASV, LQYLSL, LFYRHL, VQYKAV, LSYSSL, LSYTKV, VQYSTV, VKYNPV, VVYSEV, VVYSEV, IIYSEV, LEYVSV, LAYHTV, VQYLRL, VTYTQL, IVYTEL, VTYTQL, IVYAEL, VTYAQL, IVYTEL, VTYAQL, IVYTEL, VTYAQL, VTYAQL, VTYAQL, ILYTEL, VTYAQL, VTYAQL, ITYAAV, VTYAQL, ITYAAV, VIYIDV, VTYAEV, VTYAQL, VTYAQL, VTYAPV, VTYAQL, VTYAKV, VTYARL, VTYAQL, ILYHTV, LLYSRL, VLYAML, VIYAQL, LVYENL, LCYADL, ISYASL, LTYVLL, VTYVNL, VRYSIV, VFYRQV, VFYRQV, LKYMEV, LKYMEV, VDYGEL, LSYMDL, VLYTAV, VQYTEV, IVYASL, VEYLEV, LEYVDL, ITYADL, LTYADL, ITYADL, LTYADL, VIYENV, VIYENV, VIYENV, VIYENV, LAYYTV, VSYSAV, LVYDKL, LNYMVL, LNYACL, LDYINV, LHYATL, LHYASL, LHYASL, LHYAVL, IQYAPL, IQYASL, IQYASL, LLYLLL, VVYSQV, VIYSSV, VVYSQV, VIYSSV, VVYYRV, VPYVEL, LDYDKL, LPYYDL, LSYPVL, VAYSQV, LFYWDV, LFYWDV, LIYSQV, or LDYEFL.
[0599] 47. The N-CAR according to any one of embodiments 7 to 45 wherein the ITIM, or at least one of the ITIMs when several ITSMs are present in the intracellular domain is selected IAYGDI, IAYRDL, IAYSLL, IAYSRL, ICYALL, ICYDAL, ICYPLL, ICYQLI, IDYILV, IDYKTL, IDYTQL, IDYYNL, IEYCKL, IEYDQI, IEYGPL, IEYIRV, IEYKSL, IEYKTL, IEYSVL, IEYWGI, IFYGNV, IFYHNL, IFYKDI, IFYQNV, IFYRLI, IGYDIL, IGYDVL, IGYICL, IGYKAI, IGYLEL, IGYLPL, IGYLRL, IGYPFL, IGYSDL, IHYRQI, IHYSEL, IIYAFL, IIYHVI, IIYMFL, IIYNLL, IIYNNL, IIYSEV, IKYCLV, IKYKEL, IKYLAL, IKYTCI, ILYADI, ILYAFL, ILYCSV, ILYEGL, ILYELL, ILYFQI, ILYHTV, ILYLQV, ILYSIL, ILYSVL, ILYTEL, ILYTIL, IMYTLV, INYCSV, INYKDI, INYTTV, INYVLL, IPYDVL, IPYLLV, IPYRTV, IPYSQL, IPYSRI, IPYTQI, IQYAPL, IQYASL, IQYERL, IQYGII, IQYGNV, IQYGRV, IQYNVV, IQYRSI, IQYTEL, IQYWGI, IRYANL, IRYLDL, IRYPLL, IRYRLL, IRYRTI, ISYASL, ISYCGV, ISYEPI, ISYFQI, ISYGLI, ISYKKL, ISYLPL, ISYPML, ISYTTL, ITYAAV, ITYADL, ITYAEL, ITYAEV, ITYASV, ITYDLI, ITYENV, ITYQLL, ITYSLL, IVYAEL, IVYALV, IVYASL, IVYEIL, IVYFIL, IVYHML, IVYLCI, IVYRLL, IVYSAL, IVYSWV, IVYTEL, IVYYIL, IWYENL, IWYFVV, IWYNIL, IYYLGV, LAYALL, LAYARI, LAYDSV, LAYFGV, LAYHRL, LAYKDL, LAYKRI, LAYPPL, LAYQTL, LAYREV, LAYRII, LAYRLL, LAYSQL, LAYSSV, LAYTLL, LAYWGI, LAYYTV, LCYADL, LCYAIL, LCYFHL, LCYHPI, LCYKEI, LCYKFL, LCYMII, LCYRKI, LCYRVL, LCYSTV, LCYTLV, LDYASI, LDYCEL, LDYDKI, LDYDKL, LDYDYL, LDYDYV, LDYEFL, LDYINV, LDYNNL, LDYPHV, LDYSPV, LDYVEI, LDYWGI, LEYAPV, LEYIPL, LEYKTI, LEYLCL, LEYLKL, LEYLQI, LEYLQL, LEYQRL, LEYVDL, LEYVSV, LEYYQI, LFYAQL, LFYCSV, LFYERV, LFYGFL, LFYKYV, LFYLLL, LFYNKV, LFYRHL, LFYTLL, LFYWDV, LFYWKL, LGYGNV, LGYKEL, LGYLQL, LGYPLI, LGYPWV, LGYSAL, LGYSDL, LGYVTL, LHYAKI, LHYALV, LHYANL, LHYARL, LHYASI, LHYASL, LHYASV, LHYATI, LHYATL, LHYAVL, LHYDVV, LHYEGL, LHYETI, LHYFEI, LHYFVV, LHYGAI, LHYILI, LHYINL, LHYKRI, LHYLDL, LHYLNI, LHYLTI, LHYLVI, LHYMAI, LHYMII, LHYMNI, LHYMTI, LHYMTL, LHYMTV, LHYMVI, LHYNML, LHYPAL, LHYPDL, LHYPII, LHYPIL, LHYPLL, LHYPML, LHYPNV, LHYPSI, LHYPTI, LHYPTL, LHYPTV, LHYPVI, LHYPVL, LHYRII, LHYRTI, LHYSII, LHYSSI, LHYSTI, LHYSTL, LHYSVI, LHYTAI, LHYTAL, LHYTII, LHYTKV, LHYTLI, LHYTSI, LHYTTI, LHYTTV, LHYTVI, LHYTVL, LHYTVV, LHYVSI, LHYVTI, LHYVVI, LIYEKL, LIYENV, LIYKDL, LIYNSL, LIYSGL, LIYTLL, LIYTVL, LIYWEI, LKYCEL, LKYDKL, LKYESL, LKYFTI, LKYHTV, LKYILL, LKYIPI, LKYKHV, LKYLYL, LKYMEV, LKYMTL, LKYPAI, LKYPDV, LKYPEL, LKYQPI, LKYRGL, LKYRLL, LLYADL, LLYAPL, LLYAVV, LLYCAI, LLYEHV, LLYELL, LLYEQL, LLYGQI, LLYIRL, LLYKAL, LLYKFL, LLYKLL, LLYKTV, LLYMVV, LLYNAI, LLYNIV, LLYNVI, LLYPAI, LLYPLI, LLYPNI, LLYPSL, LLYPTI, LLYPVI, LLYPVV, LLYQIL, LLYQNI, LLYRLL, LLYRVI, LLYSII, LLYSLI, LLYSPV, LLYSRL, LLYSTI, LLYSVI, LLYSVV, LLYTTI, LLYTVI, LLYTVV, LLYVII, LLYVIL, LLYVTI, LLYWGI, LLYYLL, LLYYVI, LMYDNV, LMYMVV, LMYQEL, LMYRGI, LNYACL, LNYATI, LNYEVI, LNYGDL, LNYHKL, LNYMVL, LNYNIV, LNYPVI, LNYQMI, LNYSGV, LNYSVI, LNYTIL, LNYTTI, LNYVPI, LPYADL, LPYALL, LPYFNI, LPYFNV, LPYHDL, LPYKLI, LPYKTL, LPYLGV, LPYLKV, LPYPAL, LPYQVV, LPYRTV, LPYVEI, LPYYDL, LQYASL, LQYERI, LQYFAV, LQYFSI, LQYHNI, LQYIGL, LQYIKI, LQYLSL, LQYMIV, LQYPAI, LQYPLL, LQYPLV, LQYPSI, LQYPTL, LQYPVL, LQYRAV, LQYSAI, LQYSSI, LQYSVI, LQYTIL, LQYTLI, LQYTMI, LQYYQV, LRYAAV, LRYAGL, LRYAPL, LRYASI, LRYATI, LRYATV, LRYAVL, LRYCGI, LRYELL, LRYETL, LRYGAL, LRYGPI, LRYGTL, LRYHHI, LRYHSI, LRYHVL, LRYIAI, LRYIFV, LRYITV, LRYKEV, LRYKKL, LRYKMV, LRYKSL, LRYKVI, LRYLAI, LRYLDL, LRYLTI, LRYLTV, LRYMSI, LRYMVI, LRYNCI, LRYNGL, LRYNII, LRYNIL, LRYNKI, LRYNSL, LRYNVI, LRYNVL, LRYPFL, LRYPII, LRYPIL, LRYPLL, LRYPNI, LRYPSI, LRYPTI, LRYPTL, LRYPVI, LRYPVL, LRYQKL, LRYQMI, LRYQNL, LRYRLI, LRYRVI, LRYSAI, LRYSDL, LRYSII, LRYSMI, LRYSSI, LRYSTI, LRYSTL, LRYSVI, LRYSVL, LRYSVV, LRYTAI, LRYTIL, LRYTLI, LRYTMI, LRYTNL, LRYTPV, LRYTSI, LRYTSV, LRYTTI, LRYTTV, LRYTVI, LRYVEV, LRYVTI, LRYVTV, LSYDSL, LSYEDV, LSYFGV, LSYILI, LSYISV, LSYKQV, LSYKRL, LSYLDV, LSYMDL, LSYNAL, LSYNDL, LSYNKL, LSYNQL, LSYPVL, LSYQEV, LSYQPV, LSYQTI, LSYRSL, LSYRSV, LSYSII, LSYSSL, LSYSTL, LSYTKV, LSYTSI, LSYTTI, LSYVLI, LTYADL, LTYAEL, LTYAQV, LTYARL, LTYCDL, LTYCGL, LTYCVL, LTYEEL, LTYEFL, LTYGEV, LTYGRL, LTYKAL, LTYLRL, LTYMTL, LTYNTL, LTYPGI, LTYQSV, LTYSSV, LTYTTV, LVYDAI, LVYDKL, LVYDLV, LVYENL, LVYGQL, LVYHKL, LVYQEV, LVYRKV, LVYRNL, LVYSEI, LVYTNV, LVYWEI, LVYWKL, LVYWRL, LWYEGL, LWYKYI, LWYNHI, LWYTMI, LYYCQL, LYYGDL, LYYKKV, LYYLLI, LYYPKV, LYYRRV, LYYSTI, LYYVRI, LYYVVI, SAYATL, SAYCPL, SAYPAL, SAYQAL, SAYQTI, SAYRSV, SAYTAL, SAYTPL, SAYVVL, SCYAAV, SCYCII, SCYCLL, SCYDFL, SCYEEL, SCYEKI, SCYHIL, SCYPYI, SCYRIL, SCYRTL, SDYCNL, SDYEDL, SDYENV, SDYESV, SDYFIV, SDYHTL, SDYLAI, SDYLDI, SDYLEL, SDYQDL, SDYQRL, SDYSVI, SDYTHL, SEYASV, SEYEEL, SEYFEL, SEYGEL, SEYITL, SEYKAL, SEYKEL, SEYKGI, SEYLAI, SEYLEI, SEYMVI, SEYQSI, SEYRPI, SEYSEI, SEYSSI, SEYTPI, SEYTYV, SFYAAL, SFYDSL, SFYKGL, SFYLYV, SFYNAV, SFYPSV, SFYQQI, SFYQQL, SFYSAL, SFYSDI, SFYSKL, SFYSRV, SFYWNV, SFYYLI, SGYAQL, SGYATL, SGYEKL, SGYQLV, SGYQRI, SGYRRL, SGYSHL, SGYSQL, SGYTLI, SGYTRI, SGYYRV, SHYADV, SHYFPL, SHYIDI, SHYKRL, SHYQVV, SIYAPL, SIYATL, SIYEEL, SIYEEV, SIYELL, SIYEVL, SIYGDL, SIYKKL, SIYLNI, SIYLVI, SIYRYI, SIYSWI, SKYKEI, SKYKIL, SKYKSL, SKYLAV, SKYLGV, SKYNIL, SKYQAV, SKYSDI, SKYSSL, SKYVGL, SKYVSL, SLYANI, SLYAQV, SLYAYI, SLYDDL, SLYDFL, SLYDNL, SLYDSI, SLYDYL, SLYEGL, SLYEHI, SLYELL, SLYHCL, SLYHKL, SLYIGI, SLYKKL, SLYKNL, SLYLAI, SLYLGI, SLYNAL, SLYNLL, SLYRNI, SLYSDV, SLYTCV, SLYTTL, SLYVAI, SLYVDV, SLYVSI, SLYYAL, SLYYNI, SLYYPI, SMYDGL, SMYEDI, SMYNEI, SMYQSV, SMYTWL, SMYVSI, SNYENL, SNYGSL, SNYGTI, SNYLVL, SNYQEI, SNYRLL, SNYRTL, SNYSDI, SNYSLL, SPYAEI, SPYATL, SPYEKV, SPYGDI, SPYGGL, SPYNTL, SPYPGI, SPYPGV, SPYQEL, SPYRSV, SPYSRL, SPYTDV, SPYTSV, SPYVVI, SQYCVL, SQYEAL, SQYKRL, SQYLAL, SQYLRL, SQYMHV, SQYSAV, SQYTSI, SQYWRL, SRYAEL, SRYATL, SRYESL, SRYGLL, SRYLSL, SRYMEL, SRYMRI, SRYPPV, SRYQAL, SRYQQL, SRYRFI, SRYRFV, SRYSAL, SRYSDL, SRYTGL, SRYVRL, SSYDEL, SSYEAL, SSYEIV, SSYEPL, SSYGRL, SSYGSI, SSYGSL, SSYHII, SSYHIL, SSYHKL, SSYHNI, SSYIKV, SSYNSV, SSYQEI, SSYRKV, SSYRRV, SSYSDI, SSYTPL, SSYTRL, SSYTSV, SSYTTI, SSYVKL, STYAEV, STYAGI, STYAHL, STYALV, STYAPI, STYDHV, STYDKV, STYDQV, STYDRI, STYEEL, STYEYL, STYILV, STYLPL, STYMAV, STYQTL, STYRKL, STYSQL, STYTSI, STYYQV, SVYATL, SVYCFL, SVYCNL, SVYDSV, SVYDTI, SVYEKV, SVYEML, SVYGSV, SVYPII, SVYQPI, SVYRKV, SVYSHL, SVYSRV, SVYTAL, SVYTEL, SVYWKV, SWYDSI, SWYFTV, SYYKAI, SYYLKL, SYYSFV, SYYVTI, VAYADL, VAYARI, VAYARV, VAYDQL, VAYGHV, VAYKQV, VAYKRL, VAYNLL, VAYQRV, VAYSGV, VAYSQV, VCYCIV, VCYGLV, VCYGRL, VCYIVV, VCYLLV, VDYDCI, VDYDFL, VDYFTI, VDYFVL, VDYGEL, VDYILV, VDYIQV, VDYKNI, VDYMSI, VDYNLV, VDYPDV, VDYSDL, VDYSSV, VDYTTL, VDYVDV, VDYVGV, VDYVIL, VDYVQV, VEYAPL, VEYDPL, VEYGTI, VEYHRL, VEYLEV, VEYQLL, VEYRPL, VEYSSI, VEYSTV, VFYAEI, VFYLAV, VFYRQV, VFYVGV, VFYYVI, VFYYVL, VGYETI, VHYALL, VHYARL, VHYETL, VHYGGV, VHYHSL, VHYIPV, VHYKEI, VHYLQV, VHYNSL, VHYQSV, VHYRSL, VIYAQL, VIYDRL, VIYENV, VIYEPL, VIYERL, VIYIDV, VIYKKI, VIYKRI, VIYPFL, VIYPNI, VIYSDL, VIYSML, VIYSSV, VIYSWI, VKYADI, VKYARL, VKYATL, VKYEGL, VKYGDL, VKYGSV, VKYLLV, VKYNPV, VKYPPI, VKYQRL, VKYQVI, VKYSEV, VKYSNV, VKYSRL, VKYSTL, VKYVDL, VLYADI, VLYAML, VLYASV, VLYCLL, VLYCLV, VLYCVL, VLYDCL, VLYFHI, VLYFTV, VLYGDL, VLYGQL, VLYPMV, VLYPRL, VLYPRV, VLYSEL, VLYSRV, VLYTAV, VLYTIL, VMYDAV, VNYESI, VNYSAL, VNYSKI, VNYSSI, VPYALL, VPYDTL, VPYEDV, VPYEEL, VPYKTI, VPYLRV, VPYNDL, VPYPAL, VPYQEL, VPYRLL, VPYSEL, VPYTLL, VPYTPL, VPYTTL, VPYVEL, VPYVMV, VPYVSL, VQYKAV, VQYKEI, VQYNIV, VQYRPV, VQYSQI, VQYSTV, VQYTEV, VQYYNI, VRYARL, VRYDNL, VRYGRI, VRYKKL, VRYKRV, VRYLDV, VRYRTI, VRYSDI, VRYTQL, VRYVCL, VSYAEL, VSYASV, VSYEPI, VSYGDI, VSYIGL, VSYILV, VSYMML, VSYNNI, VSYNNL, VSYQEI, VSYQPI, VSYSAV, VSYSFL, VSYSLV, VSYSPV, VSYTML, VSYTNL, VSYTPL, VSYVKI, VSYVLL, VTYADL, VTYAEL, VTYAEV, VTYAKV, VTYAPV, VTYAQL, VTYATL, VTYATV, VTYGNI, VTYITI, VTYQII, VTYQIL, VTYQLL, VTYSAL, VTYSTL, VTYTLL, VTYTQL, VTYVNL, VVYADI, VVYEDV, VVYFCL, VVYKTL, VVYQKL, VVYSEV, VVYSQV, VVYSVV, VVYTVL, VVYYRI, VYYHWL or VYYLPL.
[0600] 48. The N-CAR according to any one of the preceding embodiments wherein the intracellular domain comprises several ITSMs having the same amino acid sequence.
[0601] 49. The N-CAR according to any one of the preceding embodiments wherein the intracellular domain comprises several ITSMs having different amino acid sequences.
[0602] 50. The N-CAR any one of the preceding embodiments wherein the intracellular domain comprises several ITIMs having the same amino acid sequence.
[0603] 51. The N-CAR any one of the preceding embodiments wherein the intracellular domain comprises several ITIMs having different amino acid sequences.
[0604] 52. The N-CAR according to any one of embodiments 7 to 51 wherein p is 1, 2, 3, 4, 5, 6, 7, 8, 9, 10, 11, 12, 13, 14, 15, 16, 17, 18, 19 or 20.
[0605] 53. The N-CAR according to any one of embodiments 7 to 51 wherein p is 1.
[0606] 54. The N-CAR according to any one of embodiments 7 to 51 wherein p is 2.
[0607] 55. The N-CAR according to any one of embodiments 7 to 51 wherein p is 3.
[0608] 56. The N-CAR according to any one of embodiments 7 to 51 wherein p is 4.
[0609] 57. The N-CAR according to any one of embodiments 7 to 51 wherein p is 5.
[0610] 58. The N-CAR according to any one of embodiments 7 to 57 wherein n is 0, 1, 2, 3, 4, 5, 6, 7, 8, 9, or 10.
[0611] 59. The N-CAR according to any one of embodiments 7 to 57 wherein n is 0.
[0612] 60. The N-CAR according to any one of embodiments 7 to 57 wherein n is 1.
[0613] 61. The N-CAR according to any one of embodiments 7 to 57 wherein n is 2.
[0614] 62. The N-CAR according to any one of embodiments 7 to 57 wherein n is 3.
[0615] 63. The N-CAR according to any one of embodiments 7 to 62 wherein m is 1, 2, 3, 4, 5, 6, 7, 8, 9, 10, 11, 12, 13, 14, 15, 16, 17, 18, 19 or 20.
[0616] 64. The N-CAR according to any one of embodiments 7 to 62 wherein m is 1, 2, 3, 4, 5, 6, 7, 8, 9, or 10.
[0617] 65. The N-CAR according to any one of embodiments 7 to 62 wherein m is 1, 2, 3, 4 or 5.
[0618] 66. The N-CAR according to any one of embodiments 7 to 62 wherein m is 1.
[0619] 67. The N-CAR according to any one of embodiments 7 to 62 wherein m is 2.
[0620] 68. The N-CAR according to any one of embodiments 7 to 62 wherein m is 3.
[0621] 69. The N-CAR according to any one of embodiments 7 to 62 wherein m is 4.
[0622] 70. The N-CAR according to any one of embodiments 7 to 62 wherein m is 5.
[0623] 71. The N-CAR according to any one of embodiments 7 to 51 wherein n is 0, m is 1 to 6 and p is 1 and ITSM is TEYATI.
[0624] 72. The N-CAR according to any one of embodiments 7 to 51 wherein n is 0, m is 1 to 6 and p is 1 and ITSM is TEYSEI.
[0625] 73. The N-CAR according to any one of embodiments 7 to 51 wherein n is 0, m is 1 to 6 and p is 1 and ITSM is TEYASI.
[0626] 74. The N-CAR according to any one of embodiments 7 to 51 wherein n is 1, m is 1 and p is 1 to 5 and ITIM is VDYGEL and ITSM is TEYATI.
[0627] 75. The N-CAR according to any one of embodiments 7 to 51 wherein n is 1, m is 1 and p is 1 to 5 and ITIM is LX₆YAX₈L wherein X₆ is selected from H or Q and X₈ is V or S, and ITSM is TEYSEI.
[0628] 76. The N-CAR according to any one of embodiments 1 to 75 wherein the intracellular domain comprises several ITSMs having the same amino acid sequence.
[0629] 77. The N-CAR according to any one of embodiments 1 to 75 wherein the intracellular domain comprises several ITSMs having different amino acid sequences.
[0630] 78. The N-CAR according to any one of embodiments 1 to 75 wherein the intracellular domain comprises several ITIMs having the same amino acid sequence.
[0631] 79. The N-CAR according to any one of embodiments 1 to 75 wherein the intracellular domain comprises several ITIMs having different amino acid sequences.
[0632] 80. The N-CAR according to any one of embodiments 1 to 79, wherein the antigen binding domain is a single chain variable fragment (scFv).
[0633] 81. The N-CAR according to any one of embodiments 1 to 79, wherein the antigen binding domain is a Fv, a Fab, or a (Fab′)2.
[0634] 82. The N-CAR according to any one of embodiments 1 to 81, wherein the antigen binding domain binds to ITGAX, CDIE, CD34, CDIC, CD123 or CD141.
[0635] 83. The N-CAR according to any one of embodiments 1 to 81, wherein the antigen binding domain binds to ZP2, GABRA6, CRTAM or GRM4, or MDGA1.
[0636] 84. The N-CAR according to any one of embodiments 1 to 81, wherein the antigen binding domain binds to SFTPC, ROS1, SLC6A4 or AGTR2.
[0637] 85. The N-CAR according to any one of embodiments 1 to 81, wherein the antigen binding domain binds to LRRC26, HTR3A, TMEM211 or MRGPRX3.
[0638] 86. The N-CAR according to any one of embodiments 1 to 81, wherein the antigen binding domain binds to MEPIB, TMIGD1, CEACAM20, or ALPI.
[0639] 87. The N-CAR according to any one of embodiments 1 to 81, wherein the antigen binding domain binds to TMPRSS11B, CYP17A1 or ATP4B.
[0640] 88. The N-CAR according to any one of embodiments 1 to 81, wherein the antigen binding domain binds to GP2, MUC21, CLCA4 and SLC27A6.
[0641] 89. The N-CAR according to any one of embodiments 1 to 81, wherein the antigen binding domain binds to a cell-surface protein present in normal tissue but not present or present at lower level on a tumor
[0642] 90. The N-CAR according to any one of embodiments 1 to 81 wherein the antigen binding domain binds to an off-tissue antigen.
[0643] 91. The N-CAR according to any one of embodiments 1 to 90 wherein the transmembrane domain comprises the transmembrane region(s) of the alpha, beta or zeta chain of the T-cell receptor, PD-1, 4-1BB, OX40, ICOS, CTLA-4, LAG3, 2B4, BTLA4, TIM-3, TIGIT, SIRPA, CD28, CD3 epsilon, CD45, CD4, CD5, CD8, CD9, CD16, CD22, CD33, CD37, CD64, CD80, CD86, CD134, CD137 or CD154.
[0644] 92. The N-CAR according to any one of embodiments 1 to 91 wherein the transmembrane domain comprises the transmembrane region of PD-1.
[0645] 93. The N-CAR according to any one of embodiments 1 to 92 wherein the transmembrane domain comprises the transmembrane region(s) of CD8 alpha.
[0646] 94. The N-CAR according to any one of embodiments 1 to 93 wherein the transmembrane domain is attached to the extracellular domain of the N-CAR via a hinge.
[0647] 95. The N-CAR according to embodiment 94 wherein the hinge is a human immunoglobulin hinge.
[0648] 96. The N-CAR according to embodiment 94 wherein the hinge is an IgG4 hinge, a CD8 alpha hinge or a PD-1 hinge.
[0649] 96.1 The N-CAR according to embodiment 94 wherein the hinge is a PD-1 hinge.
[0650] 97. An isolated immune cell comprising a P-CAR comprising,
[0651] an extracellular domain comprising an antigen binding domain,
[0652] a transmembrane domain
[0653] an intracellular domain
[0654] and an N-CAR according to any one of embodiments 1 to 96.
[0655] 98. The immune cell according to embodiment 97, wherein the antigen to which the antigen binding domain of the P-CAR binds is CD33 and the antigen to which the antigen binding domain of the N-CAR binds is ITGAX, CDIE, CD34, CDIC, CD123, or CD141.
[0656] 99. The immune cell according to embodiment 97, wherein the antigen to which the antigen binding domain of the P-CAR binds is FLT3 and the antigen to which the antigen binding domain of the N-CAR binds is ZP2, GABRA6, CRTAM, GRM4 or MDGA1.
[0657] 100. The immune cell according to embodiment 97, wherein the antigen to which the antigen binding domain of the P-CAR binds is MSLN and the antigen to which the antigen binding domain of the N-CAR binds is SFTPC, ROS1, SLC6A4 or AGTR2.
[0658] 101. The immune cell according to embodiment 97, wherein the antigen to which the antigen binding domain of the P-CAR binds is MUC16 and the antigen to which the antigen binding domain of the N-CAR binds is LRRC26, HTR3A, TMEM211 or MRGPRX3.
[0659] 102. The immune cell according to embodiment 97, wherein the antigen to which the antigen binding domain of the P-CAR binds is MUC17 and the antigen to which the antigen binding domain of the N-CAR binds is MEPIB, TMIGD1, CEACAM20 or ALPI.
[0660] 103. The immune cell according to embodiment 97, wherein the antigen to which the antigen binding domain of the P-CAR binds is present in tumor cells of pancreatic ductal adenocarcinoma and the antigen to which the antigen binding domain of the N-CAR binds is TMPRSS11B, CYP17A1 or ATP4B.
[0661] 104. The immune cell according to embodiment 97, wherein the antigen to which the antigen binding domain of the P-CAR binds is present in tumor cells of kidney clear cell carcinoma and the antigen to which the antigen binding domain of the N-CAR binds is GP2, MUC21, CLCA4 and SLC27A6.
[0662] 105. The immune cell according to any one of embodiments 97 to 104 wherein the immune cell is a T-cell.
[0663] 106. The immune cell according to embodiment 105 wherein the T-cell is a human T-cell.
[0664] 107. The immune cell according to any one of embodiments 97 to 106 for its use as a medicament.
[0665] 108. The immune cell according to any one of embodiments 97 to 106 for its use for the treatment of cancer.
[0666] 109. The immune cell according to any one of embodiments 97 to 106 derived from inflammatory T-lymphocytes, cytotoxic T-lymphocytes, regulatory T-lymphocytes or helper T-lymphocytes.
[0667] 110. A method of engineering an immune cell according to any one of embodiments 97 to 109 comprising: (a) Providing an immune cell; (b) expressing the N-CAR and the P-CAR at the surface of said cells.
[0668] 111. A method of engineering an immune cell of embodiment 110 comprising: (a) providing an immune cell; (b) introducing into said cell at least one polynucleotide encoding the N-CAR and at least one polynucleotide encoding the P-CAR; (c) expressing said polynucleotides into said cell.
[0669] 112. A method for treating a patient in need thereof comprising: a) providing an immune cell according to any one of embodiments 97 to 109, and; b) administrating said T-cells to said patient.
[0670] 113. The method for treating a patient of embodiment 112 wherein said immune cells are recovered from donors.
[0671] 114. The method for treating a patient of embodiment 113 wherein said immune cells are recovered from patients.
[0672] 115. The immune cell according to any one of embodiments 97 to 109 wherein the reduction of activation of the immune cells when both the P-CAR and N-CAR bind to their respective antigens is increased, preferably by at least 5%, 10%, 15%, 20% or 30% as compared to the same immune cell comprising an N-CAR comprising the full intracellular domain of PD-1.
[0673] 116. The immune cell according to any one of embodiments 97 to 109 wherein the reduction of activation of the immune cells when both the P-CAR and N-CAR bind to their respective antigens is increased, preferably by at least 5%, 10%, 15%, 20% or 30% as compared to the same immune cell comprising an N-CAR comprising the full intracellular domain of CTLA-4.
[0674] 117. The immune cell according to any one of embodiments 97 to 109 wherein the activation of the immune cells is reduced by at least 5%, 10%, 15%, 20%, 25%, 30%, 35%, 40%, 45%, 50%, 55%, 60%, 65%, 70%, 75%, 80%, 85% when the N-CAR and P-CAR antigen binding domains both binds to their respective antigens as compared to when only the P-CAR antigen binding domain binds to its antigen.
[0675] 118. The immune cell according to any one of embodiments 115 to 117 wherein the level of activation of the immune cell is determined by measuring cytokine production.
[0676] 119. The immune cell according to embodiment 118 wherein the cytokine is IFNgamma or TNFalpha.
[0677] 120. The immune cell according to embodiment 118 or 119 wherein the cytokine production is measured by ELISA and/or FACS and/or luminex.
[0678] 121. The immune cell according to any one of embodiments 115 to 117 wherein the level of activation of the immune cell is determined by the level of degranulation.
[0679] 122. The immune cell according to embodiment 121 wherein degranulation is measured by measuring expression of CD107a by FACS.
[0680] 123. The immune cell according to embodiment 115 to 117 wherein the level of activation of the immune cell is measured by monitoring the ability of the immune cell to kill target cells.
[0681] 124. The immune cell according to any one of embodiments 115 to 117 wherein the level of activation of the immune cell is determined by monitoring the luciferase activity in reporter cells incorporating inducible NFAT- or NfkB-regulated luciferase expression.
[0682] 125. The immune cell according to any one of embodiments 115 to 117 wherein the level of activation of the immune cell is determined by monitoring the luciferase activity in reporter cells incorporating inducible NFAT- or NfkB-regulated luciferase expression as disclosed in Example 3.
[0683] 126. A polynucleotide comprising a nucleic acid sequence encoding an N-CAR according to any one of embodiments 1 to 96.
[0684] 127. A vector comprising a polynucleotide according to embodiment 124.

1-25. (canceled)

26. A chimeric antigen receptor (CAR) comprising an extracellular domain comprising an antigen binding domain, a transmembrane domain, and an intracellular domain, wherein the intracellular domain comprises an Immunoreceptor Tyrosine-based Inhibitory Motif (ITIM), wherein said ITIM is a sequence of amino acids selected from the group consisting of SEQ ID NO: 1971, SEQ ID NO: 1974, and SEQ ID NO: 1631.

27. The CAR according to claim 26, wherein the antigen binding domain is a single chain variable fragment (scFv).

28. The CAR according to claim 26, wherein the antigen binding domain binds to PSMA, ITGAX, CDIE, CD34, CD1C, CD123, CD141, ZP2, GABRA6, CRTAM, GRM4, MDGA1, SFTPC, ROS1, SLC6A4, AGTR2, LRRC26, HTR3A, TMEM211, MRGPRX3, MEP1B, TMIGD1, CEACAM20, ALPI, TMPRSS11B, CYP17A1, ATP4B, GP2, MUC21, CLCA4 or SLC27A6.

29. The CAR according to claim 26, wherein the transmembrane domain comprises the transmembrane region(s) of the alpha, beta or zeta chain of the T-cell receptor, PD-1, 4-1BB, OX40, ICOS, CTLA-4, LAG3, 2B4, BTLA4, TIM-3, TIGIT, SIRPA, CD28, CD3 epsilon, CD45, CD4, CD5, CD8, CD9, CD16, CD22, CD33, CD37, CD64, CD80, CD86, CD134, CD137 or CD154.

30. The CAR according to claim 26, wherein the transmembrane domain comprises the transmembrane region of PD-1 or CD8 alpha.

31. The CAR according to claim 26, wherein the transmembrane domain is attached to the extracellular domain of the CAR via a hinge.

32. The CAR according to claim 31, wherein the hinge is an IgG4 hinge, a CD8 alpha hinge or a PD-1 hinge.

33. The CAR according to claim 26, wherein said ITIM is VTYAEV (SEQ ID NO:
1971).

34. The CAR according to claim 26, wherein said ITIM is VTYAQL (SEQ ID NO:
1974).

35. The CAR according to claim 26, wherein said ITIM is TEYSEV (SEQ ID NO: 1631).

36. An isolated immune cell, comprising:
a first CAR comprising an extracellular domain comprising an antigen binding domain, a transmembrane domain, and an intracellular domain; and
a second CAR, wherein the second CAR is a CAR according to claim 26.

37. The immune cell according to claim 36, wherein:
the antigen to which the antigen binding domain of the first CAR binds is CD33 and the antigen to which the antigen binding domain of the second CAR binds is ITGAX, CDIE, CD34, CD1C, CD123, or CD141, or,
the antigen to which the antigen binding domain of the first CAR binds is FLT3 and the antigen to which the antigen binding domain of the second CAR binds is ZP2, GABRA6, CRTAM, GRM4 or MDGA1, or,
the antigen to which the antigen binding domain of the first CAR binds is MSLN and the antigen to which the antigen binding domain of the second CAR binds is SFTPC, ROS1, SLC6A4 or AGTR2, or,
the antigen to which the antigen binding domain of the first CAR binds is MUC16 and the antigen to which the antigen binding domain of the second CAR binds is LRRC26, HTR3A, TMEM211 or MRGPRX3, or,
the antigen to which the antigen binding domain of the first CAR binds is MUC17 and the antigen to which the antigen binding domain of the second CAR binds is MEPIB, TMIGD1, CEACAM20 or ALPI, or,
the antigen to which the antigen binding domain of the first CAR binds is present in tumor cells of pancreatic ductal adenocarcinoma and the antigen to which the antigen binding domain of the second CAR binds is TMPRSS11B, CYP17A1 or ATP4B,
the antigen to which the antigen binding domain of the first CAR binds is present in tumor cells of kidney clear cell carcinoma and the antigen to which the antigen binding domain of the second CAR binds is GP2, MUC21, CLCA4 and SLC27A6.

38. The immune cell according to claim 36, wherein the immune cell is a human T-cell.

39. A method of engineering an immune cell according to claim 36 comprising: (a) providing an immune cell; and (b) expressing the second CAR and the first CAR at the surface of said cells.

40. A polynucleotide comprising a nucleic acid sequence encoding a CAR according to claim 26.

41. A vector comprising a polynucleotide according to claim 40.

The application's sequence listing, which the Patent Office published only in electronic form, follows.

SEQUENCE LISTING (2050 sequences)

SEQ ID NO: 1 - protein, 10 aa, synthetic construct
  REGION 1..10: note = Description of Artificial Sequence: Syntheticpeptide
ELFANKRKYT

SEQ ID NO: 2 - protein, 11 aa, synthetic construct
  REGION 1..11: note = Description of Artificial Sequence: Syntheticpeptide
RKRNNSRLGNG

SEQ ID NO: 3 - protein, 11 aa, synthetic construct
  REGION 1..11: note = Description of Artificial Sequence: Syntheticpeptide
YRHRKKRNGLT

SEQ ID NO: 4 - protein, 22 aa, synthetic construct
  REGION 1..22: note = Description of Artificial Sequence: Syntheticpeptide
YKMYGSEMLHKRDPLDEDEDTD

SEQ ID NO: 5 - protein, 24 aa, synthetic construct
  REGION 1..24: note = Description of Artificial Sequence: Syntheticpeptide
LRKRRDSLSLSTQRTQGPAESARN

SEQ ID NO: 6 - protein, 25 aa, synthetic construct
  REGION 1..25: note = Description of Artificial Sequence: Syntheticpeptide
WRMMKYQQKAAGMSPEQVLQPLEGD

SEQ ID NO: 7 - protein, 29 aa, synthetic construct
  REGION 1..29: note = Description of Artificial Sequence: Syntheticpeptide
CSRAARGTIGARRTGQPLKEDPSAVPVFS

SEQ ID NO: 8 - protein, 32 aa, synthetic construct
  REGION 1..32: note = Description of Artificial Sequence: Syntheticpolypeptide
RIRQKKAQGSTSSTRLHEPEKNAREITQDTND

SEQ ID NO: 9 - protein, 44 aa, synthetic construct
  REGION 1..44: note = Description of Artificial Sequence: Syntheticpolypeptide
NNSYQEIEEDADVEWKFARAKLWLSYFDEGRTLPAPFNLVPSPK

SEQ ID NO: 10 - protein, 45 aa, synthetic construct
  REGION 1..45: note = Description of Artificial Sequence: Syntheticpolypeptide
WLHRRLPPQPIRPLPRFAPLVKTEPQRPVKEEEPKIPGDLDQEPS

SEQ ID NO: 11 - protein, 49 aa, synthetic construct
  REGION 1..49: note = Description of Artificial Sequence: Syntheticpolypeptide
SNKCDVVVVGGGISGMAAAKLLHDSGLNVVVLEARDRVGGRTYTLRNQK

SEQ ID NO: 12 - protein, 55 aa, synthetic construct
  REGION 1..55: note = Description of Artificial Sequence: Syntheticpolypeptide
KTHRRKAARTAVGRNDTHPTTGSASPKHQKKSKLHGPTETSSCSGAAPTVEMDEE

SEQ ID NO: 13 - protein, 55 aa, synthetic construct
  REGION 1..55: note = Description of Artificial Sequence: Syntheticpolypeptide
RVKTRRKKAAQPVQNTDDVNPVMVSGSRGHQHQFQTGIVSDHPAEAGPISEDEQE

SEQ ID NO: 14 - protein, 55 aa, synthetic construct
  REGION 1..55: note = Description of Artificial Sequence: Syntheticpolypeptide
KARRKQAAGRPEKMDDEDPIMGTITSGSRKKPWPDSPGDQASPPGDAPPLEEQKE

SEQ ID NO: 15 - protein, 57 aa, synthetic construct
  REGION 1..57: note = Description of Artificial Sequence: Syntheticpolypeptide
KICRKEARKRAAAEQDVPSTLGPISQGHQHECSAGSSQDHPPPGAATYTPGKGEEQE

SEQ ID NO: 16 - protein, 59 aa, synthetic construct
  REGION 1..59: note = Description of Artificial Sequence: Syntheticpolypeptide
MENQEKASIAGHMFDVVVIGGGISGLSAAKLLTEYGVSVLVLEARDRVGGRTYTIRNEH

SEQ ID NO: 17 - protein, 61 aa, synthetic construct
  REGION 1..61: note = Description of Artificial Sequence: Syntheticpolypeptide
VRSCRKKSARPAAGVGDTGIEDANAVRGSASQGPLTEPWAEDSPPDQPPPASARSSVGEGE

SEQ ID NO: 18 - protein, 67 aa, synthetic construct
  REGION 1..67: note = Description of Artificial Sequence: Syntheticpolypeptide
KCYFLRKAKAKQMPVEMSRPAVPLLNSNNEKMSDPNMEANSHYGHNDDVRNHAMKPINDNKEPLNSD

SEQ ID NO: 19 - protein, 70 aa, synthetic construct
  REGION 1..70: note = Description of Artificial Sequence: Syntheticpolypeptide
VRLRLQKHRPPADPCRGETETMNNLANCQREKDISVSIIGATQIKNTNKKADFHGDHSADKNGFKARYPA

SEQ ID NO: 20 - protein, 76 aa, synthetic construct
  REGION 1..76: note = Description of Artificial Sequence: Syntheticpolypeptide
RRHQGKQNELSDTAGREINLVDAHLKSEQTEASTRQNSQVLLSETGIYDNDPDLCFRMQEGSEVYSNPCLEENKPG

SEQ ID NO: 21 - protein, 85 aa, synthetic construct
  REGION 1..85: note = Description of Artificial Sequence: Syntheticpolypeptide
QSVFNKRKSRVRHYLVKCPQNSSGETVTSVTSLAPLQPKKGKRQKEKPDIPPAVPAKAPIAPTFHKPKLLKPQRKVTLPKIAEEN

SEQ ID NO: 22 - protein, 114 aa, synthetic construct
  REGION 1..114: note = Description of Artificial Sequence: Syntheticpolypeptide
MSDKMSSFLHIGDICSLYAEGSTNGFISTLGLVDDRCVVQPETGDLNNPPKKFRDCLFKLCPMNRYSAQKQFWKAAKPGANSTTDAVLLNKLHHAADLEKKQNETENRKLLGTV

SEQ ID NO: 23 - protein, 114 aa, synthetic construct
  REGION 1..114: note = Description of Artificial Sequence: Syntheticpolypeptide
MTEKMSSFLYIGDIVSLYAEGSVNGFISTLGLVDDRCVVHPEAGDLANPPKKFRDCLFKVCPMNRYSAQKQYWKAKQAKQGNHTEAALLKKLQHAAELEQKQNESENKKLLGEI

SEQ ID NO: 24 - protein, 115 aa, synthetic construct
  REGION 1..115: note = Description of Artificial Sequence: Syntheticpolypeptide
MSEMSSFLHIGDIVSLYAEGSVNGFISTLGLVDDRCVVEPAAGDLDNPPKKFRDCLFKVCPMNRYSAQKQYWKAKQTKQDKEKIADVVLLQKLQHAAQMEQKQNDTENKKVHGDV

SEQ ID NO: 25 - protein, 144 aa, synthetic construct
  REGION 1..144: note = Description of Artificial Sequence: Syntheticpolypeptide
NCVSCCKDPEIDFKEFEDNFDDEIDFTPPAEDTPSVQSPAEVFTLSVPNISLPAPSQFQPSVEGLKSQVARHSLNYIQEIGNGWFGKVLLGEIYTGTSVARVIVKELKASANPKEQDTFLKNGEPYYILQHPNILQCVGQCVEA

SEQ ID NO: 26 - protein, 156 aa, synthetic construct
  REGION 1..156: note = Description of Artificial Sequence: Syntheticpolypeptide
KRVQETKFGNAFTEEDSELVVNYIAKKSFCRRAIELTLHSLGVSEELQNKLEDVVIDRNLLILGKILGEGEFGSVMEGNLKQEDGTSLKVAVKTMKLDNSSQREIEEFLSEAACMKDFSHPNVIRLLGVCIEMSSQGIPKPMVILPFMKYGDLHTY

SEQ ID NO: 27 - protein, 159 aa, synthetic construct
  REGION 1..159: note = Description of Artificial Sequence: Syntheticpolypeptide
HRRKKETRYGEVFEPTVERGELVVRYRVRKSYSRRTTEATLNSLGISEELKEKLRDVMVDRHKVALGKTLGEGEFGAVMEGQLNQDDSILKVAVKTMKIAICTRSELEDFLSEAVCMKEFDHPNVMRLIGVCFQGSERESFPAPVVILPFMKHGDLHSF

SEQ ID NO: 28 - protein, 164 aa, synthetic construct
  REGION 1..164: note = Description of Artificial Sequence: Syntheticpolypeptide
MSGGASATGPRRGPPGLEDTTSKKKQKDRANQESKDGDPRKETGSRYVAQAGLEPLASGDPSASASHAAGITGSRHRTRLFFPSSSGSASTPQEEQTKEGACEDPHDLLATPTPELLLDWRQSAEEVIVKLRVGVGPLQLEDVDAAFTDTDCVVRFAGGQQWGG

SEQ ID NO: 29 - protein, 186 aa, synthetic construct
  REGION 1..186: note = Description of Artificial Sequence: Syntheticpolypeptide
AYKRKSRESDLTLKRLQMQMDNLESRVALECKEAFAELQTDIHELTSDLDGAGIPFLDYRTYTMRVLFPGIEDHPVLRDLEVPGYRQERVEKGLKLFAQLINNKVFLLSFIRTLESQRSFSMRDRGNVASLIMTVLQSKLEYATDVLKQLLADLIDKNLESKNHPKLLLRRTESVAEKMLTNWFTF

SEQ ID NO: 30 - protein, 196 aa, synthetic construct
  REGION 1..196: note = Description of Artificial Sequence: Syntheticpolypeptide
YKRKTQDADRTLKRLQLQMDNLESRVALECKEAFAELQTDINELTNHMDEVQIPFLDYRTYAVRVLFPGIEAHPVLKELDTPPNVEKALRLFGQLLHSRAFVLTFIHTLEAQSSFSMRDRGTVASLTMVALQSRLDYATGLLKQLLADLIEKNLESKNHPKLLLRRTESVAEKMLTNWFTFLLHKFLKECAGEPLF

SEQ ID NO: 31 - protein, 197 aa, synthetic construct
  REGION 1..197: note = Description of Artificial Sequence: Syntheticpolypeptide
RWHCPRRLLGACWTLNGQEEPVSQPTPQLENEVSRQHLPATLPEMVAFYQELHTPTQGQTMVRQLMHKLLVFSAREVDHRGGCLMLQDTGISLLIPPGAVAVGRQERVSLILVWDLSDAPSLSQAQGLVSPVVACGPHGASFLKPCTLTFKHCAEQPSHARTYSSNTTLLDAKVWRPLGRPGAHASRDECRIHLSHF

SEQ ID NO: 32 - protein, 202 aa, synthetic construct
  REGION 1..202: note = Description of Artificial Sequence: Syntheticpolypeptide
KQKPRYEIRWRVIESISPDGHEYIYVDPMQLPYDSRWEFPRDGLVLGRVLGSGAFGKVVEGTAYGLSRSQPVMKVAVKMLKPTARSSEKQALMSELKIMTHLGPHLNIVNLLGACTKSGPIYIITEYCFYGDLVNYLHKNRDSFLSHHPEKPKKELDIFGLNPADESTRSYVILSFENNGDYMDMKQADTTQYVPMLERKEV

SEQ ID NO: 33 - protein, 252 aa, synthetic construct
  REGION 1..252: note = Description of Artificial Sequence: Syntheticpolypeptide
MFNYTFQQVQEHTDQIWKFQRHDLIEEYHGRPAAPPPFILLSHLQLFIKRVVLKTPAKRHKQLKNKLEKNEEAALLSWEIYLKENYLQNRQFQQKQRPEQKIEDISNKVDAMVDLLDLDPLKRSGSMEQRLASLEEQVAQTAQALHWIVRTLRASGFSSEADVPTLASQKAAEEPDAEPGGRKKTEEPGDSYHVNARHLLYPNCPVTRFPVPNEKVPWETEFLIYDPPFYTAERKDAAAMDPMGDTLEPLST

SEQ ID NO: 34 - protein, 260 aa, synthetic construct
  REGION 1..260: note = Description of Artificial Sequence: Syntheticpolypeptide
CCDCGGAPRSAAGFEPVPECSDGAIHSWAVEGPQPEPRDITTVIPQIPPDNANIIECIDNSGVYTNEYGGREMQDLGGGERMTGFELTEGVKTSGMPEICQEYSGTLRRNSMRECREGGLNMNFMESYFCQKAYAYADEDEGRPSNDCLLIYDIEGVGSPAGSVGCCSFIGEDLDDSFLDTLGPKFKKLADISLGKESYPDLDPSWPPQSTEPVCLPQETEPVVSGHPPISPHFGTTTVISESTYPSGPGVLHPKPILDP

SEQ ID NO: 35 - protein, 371 aa, synthetic construct
  REGION 1..371: note = Description of Artificial Sequence: Syntheticpolypeptide
MADGGEGEDEIQFLRTDDEVVLQCTATIHKEQQKLCLAAEGFGNRLCFLESTSNSKNVPPDLSICTFVLEQSLSVRALQEMLANTVEKSEGQVDVEKWKFMMKTAQGGGHRTLLYGHAILLRHSYSGMYLCCLSTSRSSTDKLAFDVGLQEDTTGEACWWTIHPASKQRSEGEKVRVGDDLILVSVSSERYLHLSYGNGSLHVDAAFQQTLWSVAPISSGSEAAQGYLIGGDVLRLLHGHMDECLTVPSGEHGEEQRRTVHYEGGAVSVHARSLWRLETLRVAWSGSHIRWGQPFRLRHVTTGKYLSLMEDKNLLLMDKEKADVKSTAFTFRSSKEKLDVGVRKEVDGMGTSEIKYGDSVCYIQHVDTGLW

SEQ ID NO: 36 - protein, 519 aa, synthetic construct
  REGION 1..519: note = Description of Artificial Sequence: Syntheticpolypeptide
MGDAEGEDEVQFLRTDDEVVLQCSATVLKEQLKLCLAAEGFGNRLCFLEPTSNAQNVPPDLAICCFVLEQSLSVRALQEMLANTVEAGVESSQGGGHRTLLYGHAILLRHAHSRMYLSCLTTSRSMTDKLAFDVGLQEDATGEACWWTMHPASKQRSEGEKVRVGDDIILVSVSSERYLHLSTASGELQVDASFMQTLWNMNPICSRCEEGFVTGGHVLRLFHGHMDECLTISPADSDDQRRLVYYEGGAVCTHARSLWRLEPLRISWSGSHLRWGQPLRVRHVTTGQYLALTEDQGLVVVDASKAHTKATSFCFRISKEKLDVAPKRDVEGMGPPEIKYGESLCFVQHVASGLWLTYAAPDPKALRLGVLKKKAMLHQEGHMDDALSLTRCQQEESQAARMIHSTNGLYNQFIKSLDSFSGKPRGSGPPAGTALPIEGVILSLQDLIIYFEPPSEDLQHEEKQSKLRSLRNRQSLFQEEGMLSMVLNCIDRLNVYTTAAHFAEFAGEEAAESWKEIVN

SEQ ID NO: 37 - protein, 41 aa, synthetic construct
  REGION 1..41: note = Description of Artificial Sequence: Syntheticpolypeptide
AVSLSKMLKKRSPLTTGVYVKMPPTEPECEKQFQPYFIPIN

SEQ ID NO: 38 - protein, 54 aa, synthetic construct
  REGION 1..54: note = Description of Artificial Sequence: Syntheticpolypeptide
HLWRRQWRPRRFSALEQGIHPPQAQSKIEELEQEPEPEPEPEPEPEPEPEPEQL

SEQ ID NO: 39 - protein, 78 aa, synthetic construct
  REGION 1..78: note = Description of Artificial Sequence: Syntheticpolypeptide
FKWYSHSKEKIQNLSLISLANLPPSGLANAVAEGIRSEENIYTIEENVYEVEEPNEYYCYVSSRQQPSQPLGCRFAMP

SEQ ID NO: 40 - protein, 101 aa, synthetic construct
  REGION 1..101: note = Description of Artificial Sequence: Syntheticpolypeptide
HRQNQIKQGPPRSKDEEQKPQQRPDLAVDVLERTADKATVNGLPEKDRETDTSALAAGSSQEVTYAQLDHWALTQRTARAVSPQSTKPMAESITYAAVARH

SEQ ID NO: 41 - protein, 84 aa, synthetic construct
  REGION 1..84: note = Description of Artificial Sequence: Syntheticpolypeptide
HRWCSNKKNAAVMDQESAGNRTANSEDSDEQDPQEVTYTQLNHCVFTQRKITRPSQRPKTPPTDIIVYAELPNAESRSKVVSCP

SEQ ID NO: 42 - protein, 4 aa, synthetic construct
  REGION 1..4: note = Description of Artificial Sequence: Syntheticpeptide
RRRP

SEQ ID NO: 43 - protein, 4 aa, synthetic construct
  REGION 1..4: note = Description of Artificial Sequence: Syntheticpeptide
MSEE

SEQ ID NO: 44 - protein, 4 aa, synthetic construct
  REGION 1..4: note = Description of Artificial Sequence: Syntheticpeptide
MTSE

SEQ ID NO: 45 - protein, 4 aa, synthetic construct
  REGION 1..4: note = Description of Artificial Sequence: Syntheticpeptide
DRYL

SEQ ID NO: 46 - protein, 4 aa, synthetic construct
  REGION 1..4: note = Description of Artificial Sequence: Syntheticpeptide
MTDS

SEQ ID NO: 47 - protein, 4 aa, synthetic construct
  REGION 1..4: note = Description of Artificial Sequence: Syntheticpeptide
AAKP

SEQ ID NO: 48 - protein, 4 aa, synthetic construct
  REGION 1..4: note = Description of Artificial Sequence: Syntheticpeptide
QHFS

SEQ ID NO: 49 - protein, 4 aa, synthetic construct
  REGION 1..4: note = Description of Artificial Sequence: Syntheticpeptide
MKPK

SEQ ID NO: 50 - protein, 4 aa, synthetic construct
  REGION 1..4: note = Description of Artificial Sequence: Syntheticpeptide
IAAL

SEQ ID NO: 51 - protein, 4 aa, synthetic construct
  REGION 1..4: note = Description of Artificial Sequence: Syntheticpeptide
CLNP

SEQ ID NO: 52 - protein, 4 aa, synthetic construct
  REGION 1..4: note = Description of Artificial Sequence: Syntheticpeptide
QKVL

SEQ ID NO: 53 - protein, 5 aa, synthetic construct
  REGION 1..5: note = Description of Artificial Sequence: Syntheticpeptide
DRYQS

SEQ ID NO: 54 - protein, 5 aa, synthetic construct
  REGION 1..5: note = Description of Artificial Sequence: Syntheticpeptide
LKAKD

SEQ ID NO: 55 - protein, 5 aa, synthetic construct
  REGION 1..5: note = Description of Artificial Sequence: Syntheticpeptide
DRYYA

SEQ ID NO: 56 - protein, 5 aa, synthetic construct
  REGION 1..5: note = Description of Artificial Sequence: Syntheticpeptide
MSYYG

SEQ ID NO: 57 - protein, 5 aa, synthetic construct
  REGION 1..5: note = Description of Artificial Sequence: Syntheticpeptide
SSSKP

SEQ ID NO: 58 - protein, 5 aa, synthetic construct
  REGION 1..5: note = Description of Artificial Sequence: Syntheticpeptide
LKIRH

SEQ ID NO: 59 - protein, 5 aa, synthetic construct
  REGION 1..5: note = Description of Artificial Sequence: Syntheticpeptide
DVRHV

SEQ ID NO: 60 - protein, 5 aa, synthetic construct
  REGION 1..5: note = Description of Artificial Sequence: Syntheticpeptide
DRFYA

SEQ ID NO: 61 - protein, 5 aa, synthetic construct
  REGION 1..5: note = Description of Artificial Sequence: Syntheticpeptide
EGWRI

SEQ ID NO: 62 - protein, 5 aa, synthetic construct
  REGION 1..5: note = Description of Artificial Sequence: Syntheticpeptide
SDIKR

SEQ ID NO: 63 - protein, 6 aa, synthetic construct
  REGION 1..6: note = Description of Artificial Sequence: Syntheticpeptide
LHHKKY

SEQ ID NO: 64 - protein, 6 aa, synthetic construct
  REGION 1..6: note = Description of Artificial Sequence: Syntheticpeptide
TVDRYL

SEQ ID NO: 65 - protein, 6 aa, synthetic construct
  REGION 1..6: note = Description of Artificial Sequence: Syntheticpeptide
SSPTFR

SEQ ID NO: 66 - protein, 6 aa, synthetic construct
  REGION 1..6: note = Description of Artificial Sequence: Syntheticpeptide
WRRAGH

SEQ ID NO: 67 - protein, 6 aa, synthetic construct
  REGION 1..6: note = Description of Artificial Sequence: Syntheticpeptide
YRVDLV

SEQ ID NO: 68 - protein, 6 aa, synthetic construct
  REGION 1..6: note = Description of Artificial Sequence: Syntheticpeptide
NSFDLA

SEQ ID NO: 69 - protein, 6 aa, synthetic construct
  REGION 1..6: note = Description of Artificial Sequence: Syntheticpeptide
YRSGIT

SEQ ID NO: 70 - protein, 6 aa, synthetic construct
  REGION 1..6: note = Description of Artificial Sequence: Syntheticpeptide
YRLGLT

SEQ ID NO: 71 - protein, 6 aa, synthetic construct
  REGION 1..6: note = Description of Artificial Sequence: Syntheticpeptide
QHIMAI

SEQ ID NO: 72 - protein, 6 aa, synthetic construct
  REGION 1..6: note = Description of Artificial Sequence: Syntheticpeptide
NSCANP

SEQ ID NO: 73 - protein, 6 aa, synthetic construct
  REGION 1..6: note = Description of Artificial Sequence: Syntheticpeptide
RRFCAT

SEQ ID NO: 74 - protein, 7 aa, synthetic construct
  REGION 1..7: note = Description of Artificial Sequence: Syntheticpeptide
GDMANNS

SEQ ID NO: 75 - protein, 7 aa, synthetic construct
  REGION 1..7: note = Description of Artificial Sequence: Syntheticpeptide
MAYQSLR

SEQ ID NO: 76 - protein, 7 aa, synthetic construct
  REGION 1..7: note = Description of Artificial Sequence: Syntheticpeptide
TARNLTV

SEQ ID NO: 77 - protein, 7 aa, synthetic construct
  REGION 1..7: note = Description of Artificial Sequence: Syntheticpeptide
MERAEEP

SEQ ID NO: 78 - protein, 7 aa, synthetic construct
  REGION 1..7: note = Description of Artificial Sequence: Syntheticpeptide
SMDRFLA

SEQ ID NO: 79 - protein, 7 aa, synthetic construct
  REGION 1..7: note = Description of Artificial Sequence: Syntheticpeptide
LRLAAAP

SEQ ID NO: 80 - protein, 7 aa, synthetic construct
  REGION 1..7: note = Description of Artificial Sequence: Syntheticpeptide
LRLFAAP

SEQ ID NO: 81 - protein, 7 aa, synthetic construct
  REGION 1..7: note = Description of Artificial Sequence: Syntheticpeptide
KRLIALS

SEQ ID NO: 82 - protein, 8 aa, synthetic construct
  REGION 1..8: note = Description of Artificial Sequence: Syntheticpeptide
YSNSSVNP

SEQ ID NO: 83 - protein, 8 aa, synthetic construct
  REGION 1..8: note = Description of Artificial Sequence: Syntheticpeptide
YANSCVNP

SEQ ID NO: 84 - protein, 8 aa, synthetic construct
  REGION 1..8: note = Description of Artificial Sequence: Syntheticpeptide
KLSPRVKR

SEQ ID NO: 85 - protein, 8 aa, synthetic construct
  REGION 1..8: note = Description of Artificial Sequence: Syntheticpeptide
KIRLRCQS

SEQ ID NO: 86 - protein, 6 aa, synthetic construct
  REGION 1..6: note = Description of Artificial Sequence: Syntheticpeptide
TAYELV

SEQ ID NO: 87 - protein, 8 aa, synthetic construct
  REGION 1..8: note = Description of Artificial Sequence: Syntheticpeptide
MASESSPL

SEQ ID NO: 88 - protein, 8 aa, synthetic construct
  REGION 1..8: note = Description of Artificial Sequence: Syntheticpeptide
KTANEGGS

SEQ ID NO: 89 - protein, 8 aa, synthetic construct
  REGION 1..8: note = Description of Artificial Sequence: Syntheticpeptide
DFAKEGHS

SEQ ID NO: 90 - protein, 8 aa, synthetic construct
  REGION 1..8: note = Description of Artificial Sequence: Syntheticpeptide
DHVRRKDS

SEQ ID NO: 91 - protein, 8 aa, synthetic construct
  REGION 1..8: note = Description of Artificial Sequence: Syntheticpeptide
DNVKKENS

SEQ ID NO: 92 - protein, 8 aa, synthetic construct
  REGION 1..8: note = Description of Artificial Sequence: Syntheticpeptide
VMWKHRYQ

SEQ ID NO: 93 - protein, 8 aa, synthetic construct
  REGION 1..8: note = Description of Artificial Sequence: Syntheticpeptide
KMYYSRRG

SEQ ID NO: 94 - protein, 9 aa, synthetic construct
  REGION 1..9: note = Description of Artificial Sequence: Syntheticpeptide
DRYIAIRIP

SEQ ID NO: 95 - protein, 9 aa, synthetic construct
  REGION 1..9: note = Description of Artificial Sequence: Syntheticpeptide
DRYLAICVP

SEQ ID NO: 96 - protein, 9 aa, synthetic construct
  REGION 1..9: note = Description of Artificial Sequence: Syntheticpeptide
DRYLRVKLT

SEQ ID NO: 97 - protein, 9 aa, synthetic construct
  REGION 1..9: note = Description of Artificial Sequence: Syntheticpeptide
DRYIGVSYP

SEQ ID NO: 98 - protein, 9 aa, synthetic construct
  REGION 1..9: note = Description of Artificial Sequence: Syntheticpeptide
DRYIGVRYS

SEQ ID NO: 99 - protein, 9 aa, synthetic construct
  REGION 1..9: note = Description of Artificial Sequence: Syntheticpeptide
DRYVGVRHS

SEQ ID NO: 100 - protein, 9 aa, synthetic construct
  REGION 1..9: note = Description of Artificial Sequence: Syntheticpeptide
DRYLAVTNP

SEQ ID NO: 101 - protein, 9 aa, synthetic construct
  REGION 1..9: note = Description of Artificial Sequence: Syntheticpeptide
MPFHPVTAA

SEQ ID NO: 102 - protein, 9 aa, synthetic construct
  REGION 1..9: note = Description of Artificial Sequence: Syntheticpeptide
DRYISIHRP

SEQ ID NO: 103 - protein, 9 aa, synthetic construct
  REGION 1..9: note = Description of Artificial Sequence: Syntheticpeptide
MQLKILVSA

SEQ ID NO: 104 - protein, 9 aa, synthetic construct
  REGION 1..9: note = Description of Artificial Sequence: Syntheticpeptide
WKQRRAKEK

SEQ ID NO: 105 - protein, 9 aa, synthetic construct
  REGION 1..9: note = Description of Artificial Sequence: Syntheticpeptide
DRFIAVVHP

SEQ ID NO: 106 - protein, 9 aa, synthetic construct
  REGION 1..9: note = Description of Artificial Sequence: Syntheticpeptide
DRYIAITKP

SEQ ID NO: 107 - protein, 9 aa, synthetic construct
  REGION 1..9: note = Description of Artificial Sequence: Syntheticpeptide
NRYCYICHS

SEQ ID NO: 108 - protein, 9 aa, synthetic construct
  REGION 1..9: note = Description of Artificial Sequence: Syntheticpeptide
DRYLAITKP

SEQ ID NO: 109 - protein, 9 aa, synthetic construct
  REGION 1..9: note = Description of Artificial Sequence: Syntheticpeptide
DRYCAVMDP

SEQ ID NO: 110 - protein, 9 aa, synthetic construct
  REGION 1..9: note = Description of Artificial Sequence: Syntheticpeptide
DRYISIFYA

SEQ ID NO: 111 - protein, 9 aa, synthetic construct
  REGION 1..9: note = Description of Artificial Sequence: Syntheticpeptide
DRYITIFHA

SEQ ID NO: 112 - protein, 9 aa, synthetic construct
  REGION 1..9: note = Description of Artificial Sequence: Syntheticpeptide
NRYCYICHS

SEQ ID NO: 113 - protein, 9 aa, synthetic construct
  REGION 1..9: note = Description of Artificial Sequence: Syntheticpeptide
WKKICNKSS

SEQ ID NO: 114 - protein, 9 aa, synthetic construct
  REGION 1..9: note = Description of Artificial Sequence: Syntheticpeptide
WCYRKRYFV

SEQ ID NO: 115 - protein, 9 aa, synthetic construct
  REGION 1..9: note = Description of Artificial Sequence: Syntheticpeptide
AHSNSCLNP

SEQ ID NO: 116 - protein, 9 aa, synthetic construct
  REGION 1..9: note = Description of Artificial Sequence: Syntheticpeptide
PVFYKLGIT

SEQ ID NO: 117 - protein, 10 aa, synthetic construct
  REGION 1..10: note = Description of Artificial Sequence: Syntheticpeptide
KFHRSRRLLG

SEQ ID NO: 118 - protein, 10 aa, synthetic construct
  REGION 1..10: note = Description of Artificial Sequence: Syntheticpeptide
VDRYLRVKIP

SEQ ID NO: 119 - protein, 10 aa, synthetic construct
  REGION 1..10: note = Description of Artificial Sequence: Syntheticpeptide
FERSCRKENM

SEQ ID NO: 120 - protein, 10 aa, synthetic construct
  REGION 1..10: note = Description of Artificial Sequence: Syntheticpeptide
LPSIYLVFLI

SEQ ID NO: 121 - protein, 10 aa, synthetic construct
  REGION 1..10: note = Description of Artificial Sequence: Syntheticpeptide
SSKTFQTWQS

SEQ ID NO: 122 - protein, 10 aa, synthetic construct
  REGION 1..10: note = Description of Artificial Sequence: Syntheticpeptide
IDRYIAVCHP

SEQ ID NO: 123 - protein, 10 aa, synthetic construct
  REGION 1..10: note = Description of Artificial Sequence: Syntheticpeptide
SFCLRNLFFP

SEQ ID NO: 124 - protein, 10 aa, synthetic construct
  REGION 1..10: note = Description of Artificial Sequence: Syntheticpeptide
LLKTAKEGGS

SEQ ID NO: 125 - protein, 10 aa, synthetic construct
  REGION 1..10: note = Description of Artificial Sequence: Syntheticpeptide
MWRNSKVMNI

SEQ ID NO: 126 - protein, 11 aa, synthetic construct
  REGION 1..11: note = Description of Artificial Sequence: Syntheticpeptide
VEKKLFIHEYI

SEQ ID NO: 127 - protein, 11 aa, synthetic construct
  REGION 1..11: note = Description of Artificial Sequence: Syntheticpeptide
RKRNNSRLGNG

SEQ ID NO: 128 - protein, 11 aa, synthetic construct
  REGION 1..11: note = Description of Artificial Sequence: Syntheticpeptide
QRITVHVTRRP

SEQ ID NO: 129 - protein, 12 aa, synthetic construct
  REGION 1..12: note = Description of Artificial Sequence: Syntheticpeptide
MEAAHAKTTEEC

SEQ ID NO: 130 - protein, 12 aa, synthetic construct
  REGION 1..12: note = Description of Artificial Sequence: Syntheticpeptide
MARISFSYLCPA

SEQ ID NO: 131 - protein, 12 aa, synthetic construct
  REGION 1..12: note = Description of Artificial Sequence: Syntheticpeptide
CCKRQKGKPKRK

SEQ ID NO: 132 - protein, 12 aa, synthetic construct
  REGION 1..12: note = Description of Artificial Sequence: Syntheticpeptide
MTGDKGPQRLSG

SEQ ID NO: 133 - protein, 13 aa, synthetic construct
  REGION 1..13: note = Description of Artificial Sequence: Syntheticpeptide
PDIPQSVKNKVLE

SEQ ID NO: 134 - protein, 13 aa, synthetic construct
  REGION 1..13: note = Description of Artificial Sequence: Syntheticpeptide
KIFKIDIVLWYRD

SEQ ID NO: 135 - protein, 13 aa, synthetic construct
  REGION 1..13: note = Description of Artificial Sequence: Syntheticpeptide
TEYVVRLWSAGCR

SEQ ID NO: 136 - protein, 13 aa, synthetic construct
  REGION 1..13: note = Description of Artificial Sequence: Syntheticpeptide
QSKSELSHYTFYF

SEQ ID NO: 137 - protein, 10 aa, synthetic construct
  REGION 1..10: note = Description of Artificial Sequence: Syntheticpeptide
SIVAYKQVPL

SEQ ID NO: 138 - protein, 13 aa, synthetic construct
  REGION 1..13: note = Description of Artificial Sequence: Syntheticpeptide
SLDFFGSQNTQDD

SEQ ID NO: 139 - protein, 14 aa, synthetic construct
  REGION 1..14: note = Description of Artificial Sequence: Syntheticpeptide
LWLHNGRSCFGVNR

SEQ ID NO: 140 - protein, 14 aa, synthetic construct
  REGION 1..14: note = Description of Artificial Sequence: Syntheticpeptide
RFLRLNLKPDLSDT

SEQ ID NO: 141 - protein, 14 aa, synthetic construct
  REGION 1..14: note = Description of Artificial Sequence: Syntheticpeptide
REHQRSGSYHVREE

SEQ ID NO: 142 - protein, 14 aa, synthetic construct
  REGION 1..14: note = Description of Artificial Sequence: Syntheticpeptide
MITLTELKCLADAQ

SEQ ID NO: 143 - protein, 14 aa, synthetic construct
  REGION 1..14: note = Description of Artificial Sequence: Syntheticpeptide
YNLTRLCRWDKRLL

SEQ ID NO: 144 - protein, 14 aa, synthetic construct
  REGION 1..14: note = Description of Artificial Sequence: Syntheticpeptide
AFMNENFKKNVLSA

SEQ ID NO: 145 - protein, 15 aa, synthetic construct
  REGION 1..15: note = Description of Artificial Sequence: Syntheticpeptide
MIYRLAQAEERQQLE

SEQ ID NO: 146 - protein, 15 aa, synthetic construct
  REGION 1..15: note = Description of Artificial Sequence: Syntheticpeptide
KFRKNFWKLVKDIGC

SEQ ID NO: 147 - protein, 15 aa, synthetic construct
  REGION 1..15: note = Description of Artificial Sequence: Syntheticpeptide
ALALAALAAVEPACG

SEQ ID NO: 148 - protein, 15 aa, synthetic construct
  REGION 1..15: note = Description of Artificial Sequence: Syntheticpeptide
KKIAAATETAAQENA

SEQ ID NO: 149 - protein, 15 aa, synthetic construct
  REGION 1..15: note = Description of Artificial Sequence: Syntheticpeptide
YRKVSKAEEAAQENA

SEQ ID NO: 150 - protein, 15 aa, synthetic construct
  REGION 1..15: note = Description of Artificial Sequence: Syntheticpeptide
LKDFSILLMEGVPKS

SEQ ID NO: 151 - protein, 15 aa, synthetic construct
  REGION 1..15: note = Description of Artificial Sequence: Syntheticpeptide
TVATAVEQYVPSEKL

SEQ ID NO: 152 - protein, 16 aa, synthetic construct
  REGION 1..16: note = Description of Artificial Sequence: Syntheticpeptide
MGRQKELVSRCGEMLH

SEQ ID NO: 153 - protein, 16 aa, synthetic construct
  REGION 1..16: note = Description of Artificial Sequence: Syntheticpeptide
CKRRRGQSPQSSPDLP

SEQ ID NO: 154 - protein, 16 aa, synthetic construct
  REGION 1..16: note = Description of Artificial Sequence: Syntheticpeptide
LLEGVHLFLTARNLTV

SEQ ID NO: 155 - protein, 16 aa, synthetic construct
  REGION 1..16: note = Description of Artificial Sequence: Syntheticpeptide
EERERKHHLKHGPNAP

SEQ ID NO: 156 - protein, 16 aa, synthetic construct
  REGION 1..16: note = Description of Artificial Sequence: Syntheticpeptide
PLTHRLLCSEEPPRLH

SEQ ID NO: 157 - protein, 16 aa, synthetic construct
  REGION 1..16: note = Description of Artificial Sequence: Syntheticpeptide
LYLLVRKHINRAHTAL

SEQ ID NO: 158 - protein, 16 aa, synthetic construct
  REGION 1..16: note = Description of Artificial Sequence: Syntheticpeptide
KLPLWGQPSDQNCYDD

SEQ ID NO: 159 - protein, 17 aa, synthetic construct
  REGION 1..17: note = Description of Artificial Sequence: Syntheticpeptide
MYRLKVLQMRLRSAITG

SEQ ID NO: 160 - protein, 17 aa, synthetic construct
  REGION 1..17: note = Description of Artificial Sequence: Syntheticpeptide
SMRGTICNPGPRKSMSK

SEQ ID NO: 161 - protein, 17 aa, synthetic construct
  REGION 1..17: note = Description of Artificial Sequence: Syntheticpeptide
RILVRKLEPAQGSLHTQ

SEQ ID NO: 162 - protein, 16 aa, synthetic construct
  REGION 1..16: note = Description of Artificial Sequence: Syntheticpeptide
SRYATLMQKDSSQETT

SEQ ID NO: 163 - protein, 17 aa, synthetic construct
  REGION 1..17: note = Description of Artificial Sequence: Syntheticpeptide
SSHFGCQLVCCQSSNVS

SEQ ID NO: 164 - protein, 17 aa, synthetic construct
  REGION 1..17: note = Description of Artificial Sequence: Syntheticpeptide
RILMRKLRTQETRGNEV

SEQ ID NO: 165 - protein, 17 aa, synthetic construct
  REGION 1..17: note = Description of Artificial Sequence: Syntheticpeptide
RILLQKLRPPDIRKSDS

SEQ ID NO: 166 - protein, 17 aa, synthetic construct
  REGION 1..17: note = Description of Artificial Sequence: Syntheticpeptide
RILLQKLTSPDVGGNDQ

SEQ ID NO: 167 - protein, 18 aa, synthetic construct
  REGION 1..18: note = Description of Artificial Sequence: Syntheticpeptide
RSVRPCFTQAAFLKSKYW

SEQ ID NO: 168 - protein, 18 aa, synthetic construct
  REGION 1..18: note = Description of Artificial Sequence: Syntheticpeptide
RSGRGRKLSGDQITLPTT

SEQ ID NO: 169 - protein, 18 aa, synthetic construct
  REGION 1..18: note = Description of Artificial Sequence: Syntheticpeptide
MAAENEASQESALGAYSP

SEQ ID NO: 170 - protein, 18 aa, synthetic construct
  REGION 1..18: note = Description of Artificial Sequence: Syntheticpeptide
TAHVFSCLSLRLRAAFFY

SEQ ID NO: 171 - protein, 19 aa, synthetic construct
  REGION 1..19: note = Description of Artificial Sequence: Syntheticpeptide
NPFIYSRNSAGLRRKVLWC

SEQ ID NO: 172 - protein, 20 aa, synthetic construct
  REGION 1..20: note = Description of Artificial Sequence: Syntheticpeptide
NNESSNNPSSIASFLSSITY

SEQ ID NO: 173 - protein, 20 aa, synthetic construct
  REGION 1..20: note = Description of Artificial Sequence: Syntheticpeptide
TPQLFINYKLKSVAHLPWRM

SEQ ID NO: 174 - protein, 20 aa, synthetic construct
  REGION 1..20: note = Description of Artificial Sequence: Syntheticpeptide
WRLKPSADCGPFRGLPLFIH

SEQ ID NO: 175 - protein, 21 aa, synthetic construct
  REGION 1..21: note = Description of Artificial Sequence: Syntheticpeptide
NIPLLFYHLWRYFHRPADGSE

SEQ ID NO: 176 - protein, 21 aa, synthetic construct
  REGION 1..21: note = Description of Artificial Sequence: Syntheticpeptide
SQVTKSSPEQSYQGDMYPTRG

SEQ ID NO: 177 - protein, 21 aa, synthetic construct
  REGION 1..21: note = Description of Artificial Sequence: Syntheticpeptide
CCSALQKRCRKCFNKDSTEAT

SEQ ID NO: 178 - protein, 21 aa, synthetic construct
  REGION 1..21: note = Description of Artificial Sequence: Syntheticpeptide
CQRLAARLGVVTGKDLGEVCH

SEQ ID NO: 179 - protein, 21 aa, synthetic construct
  REGION 1..21: note = Description of Artificial Sequence: Syntheticpeptide
QVFRNISGKQSSLPAMSKVRR

SEQ ID NO: 180 - protein, 22 aa, synthetic construct
  REGION 1..22: note = Description of Artificial Sequence: Syntheticpeptide
GGRREGESWNWAWVLSTRLARH

SEQ ID NO: 181 - protein, 22 aa, synthetic construct
  REGION 1..22: note = Description of Artificial Sequence: Syntheticpeptide
YKMYGSEMLHKRDPLDEDEDTD

SEQ ID NO: 182 - protein, 23 aa, synthetic construct
  REGION 1..23: note = Description of Artificial Sequence: Syntheticpeptide
HMYRERGGELLVHTGFLGSSQDR

SEQ ID NO: 183 - protein, 23 aa, synthetic construct
  REGION 1..23: note = Description of Artificial Sequence: Syntheticpeptide
RKWCQYQKEIMERPPPFKPPPPP

SEQ ID NO: 184 - protein, 23 aa, synthetic construct
  REGION 1..23: note = Description of Artificial Sequence: Syntheticpeptide
HNKRKIFLLVQSRKWRDGLCSKT

SEQ ID NO: 185 - protein, 23 aa, synthetic construct
  REGION 1..23: note = Description of Artificial Sequence: Syntheticpeptide
RAARRRPEHLDTPDTPPRSQAQE

SEQ ID NO: 186 - protein, 23 aa, synthetic construct
  REGION 1..23: note = Description of Artificial Sequence: Syntheticpeptide
NGTCFTAGRLIYVAGREGHMLKV

SEQ ID NO: 187 - protein, 24 aa, synthetic construct
  REGION 1..24: note = Description of Artificial Sequence: Syntheticpeptide
DANYEMPGETLKVRYWPRDSWPVG

SEQ ID NO: 188 - protein, 15 aa, synthetic construct
  REGION 1..15: note = Description of Artificial Sequence: Syntheticpeptide
ARSQMARNIWYFVVS

SEQ ID NO: 189 - protein, 24 aa, synthetic construct
  REGION 1..24: note = Description of Artificial Sequence: Syntheticpeptide
LRKRRDSLSLSTQRTQGPAESARN

SEQ ID NO: 190 - protein, 25 aa, synthetic construct
  REGION 1..25: note = Description of Artificial Sequence: Syntheticpeptide
DAASEIPEQGPVIKFWPNEKWAFIG

SEQ ID NO: 191 - protein, 25 aa, synthetic construct
  REGION 1..25: note = Description of Artificial Sequence: Syntheticpeptide
WGYKNYREQRQLPQGDYVKKPGDGD

SEQ ID NO: 192 - protein, 23 aa, synthetic construct
  REGION 1..23: note = Description of Artificial Sequence: Syntheticpeptide
TSYYSFVSHLRKIRTCTSIMEKD

SEQ ID NO: 193 - protein, 19 aa, synthetic construct
  REGION 1..19: note = Description of Artificial Sequence: Syntheticpeptide
LIVRALIYKDLDNSPLRRK

SEQ ID NO: 194 - protein, 24 aa, synthetic construct
  REGION 1..24: note = Description of Artificial Sequence: Syntheticpeptide
DHWALTQRTARAVSPQSTKPMAES

SEQ ID NO: 195 - protein, 25 aa, synthetic construct
  REGION 1..25: note = Description of Artificial Sequence: Syntheticpeptide
HHNKRKIIAFVLEGKRSKVTRRPKA

SEQ ID NO: 196 - protein, 26 aa, synthetic construct
  REGION 1..26: note = Description of Artificial Sequence: Syntheticpeptide
EWKSPFGLTPKGRNRSKVFSFSSALN

SEQ ID NO: 197 - protein, 27 aa, synthetic construct
  REGION 1..27: note = Description of Artificial Sequence: Syntheticpeptide
YFLGRLVPRGRGAAEAATRKQRITETE

SEQ ID NO: 198 - protein, 28 aa, synthetic construct
  REGION 1..28: note = Description of Artificial Sequence: Syntheticpeptide
QATACRTCHRQQQPAACRGFARVARTIL

SEQ ID NO: 199 - protein, 28 aa, synthetic construct
  REGION 1..28: note = Description of Artificial Sequence: Syntheticpeptide
NKFSKYYQKQKDIDVDQCSEDAPEKCHE

SEQ ID NO: 200 - protein, 28 aa, synthetic construct
  REGION 1..28: note = Description of Artificial Sequence: Syntheticpeptide
SKCSREVLWHCHLCPSSTEHASASANGH

SEQ ID NO: 201 - protein, 28 aa, synthetic construct
  REGION 1..28: note = Description of Artificial Sequence: Syntheticpeptide
DMGSSDGETTHDSQITQEAVPKSLGASE

SEQ ID NO: 202 - protein, 29 aa, synthetic construct
  REGION 1..29: note = Description of Artificial Sequence: Syntheticpeptide
CSRAARGTIGARRTGQPLKEDPSAVPVFS

SEQ ID NO: 203 - protein, 30 aa, synthetic construct
  REGION 1..30: note = Description of Artificial Sequence: Syntheticpolypeptide
SVQKLSEFLSSAEIREEQCAPHEPTPQGPA

SEQ ID NO: 204 - protein, 30 aa, synthetic construct
  REGION 1..30: note = Description of Artificial Sequence: Syntheticpolypeptide
KCYKIEIMLFYRNHFGAEELDGDNKDYDAY

SEQ ID NO: 205 - protein, 30 aa, synthetic construct
  REGION 1..30: note = Description of Artificial Sequence: Syntheticpolypeptide
KCYNIELMLFYRQHFGADETNDDNKEYDAY

SEQ ID NO: 206 - protein, 30 aa, synthetic construct
  REGION 1..30: note = Description of Artificial Sequence: Syntheticpolypeptide
GWKLRSYKTLFDAAETMVSLQLGIFNYEEV

SEQ ID NO: 207 - protein, 30 aa, synthetic construct
  REGION 1..30: note = Description of Artificial Sequence: Syntheticpolypeptide
SSFSSCKDVTAEENNEAKNLQLAVARIKKG

SEQ ID NO: 208 - protein, 30 aa, synthetic construct
  REGION 1..30: note = Description of Artificial Sequence: Syntheticpolypeptide
MRTKAAGCAERRPLQPRTEAAAAPAGRAMP

SEQ ID NO: 209 - protein, 31 aa, synthetic construct
  REGION 1..31: note = Description of Artificial Sequence: Syntheticpolypeptide
RKRWQNEKLGLDAGDEYEDENLYEGLNLDDC

SEQ ID NO: 210 - protein, 31 aa, synthetic construct
  REGION 1..31: note = Description of Artificial Sequence: Syntheticpolypeptide
MASHEVDNAELGSASAHGTPGSEAGPEELNT

SEQ ID NO: 211 - protein, 31 aa, synthetic construct
  REGION 1..31: note = Description of Artificial Sequence: Syntheticpolypeptide
NGHPTSNAALFFIERRPHHWPAMKFRSHPDH

SEQ ID NO: 212 - protein, 32 aa, synthetic construct
  REGION 1..32: note = Description of Artificial Sequence: Syntheticpolypeptide
ALLNNIIEIRLDAKKFVTELRRPVAVRAKDIG

SEQ ID NO: 213 - protein, 32 aa, synthetic construct
  REGION 1..32: note = Description of Artificial Sequence: Syntheticpolypeptide
PETKGQSLAEIDQQFQKRRFTLSFGHRQNSTG

SEQ ID NO: 214 - protein, 32 aa, synthetic construct
  REGION 1..32: note = Description of Artificial Sequence: Syntheticpolypeptide
PETKGKKLEEIESLFDNRLCTCGTSDSDEGRY

SEQ ID NO: 215 - protein, 32 aa, synthetic construct
  REGION 1..32: note = Description of Artificial Sequence: Syntheticpolypeptide
YNLMSQKFRAAFRKLCNCKQKPTEKPANYSVA

SEQ ID NO: 216 - protein, 33 aa, synthetic construct
  REGION 1..33: note = Description of Artificial Sequence: Syntheticpolypeptide
NYIFFGRGPQRQKKAAEKAASANNEKMRLDVNK

SEQ ID NO: 217 - protein, 33 aa, synthetic construct
  REGION 1..33: note = Description of Artificial Sequence: Syntheticpolypeptide
DLNESANSTAQYASNAWFAAASSEPEEGISVFE

SEQ ID NO: 218 - protein, 33 aa, synthetic construct; identical to SEQ ID NO: 217
  REGION 1..33: note = Description of Artificial Sequence: Syntheticpolypeptide

SEQ ID NO: 219 - protein, 34 aa, synthetic construct
  REGION 1..34: note = Description of Artificial Sequence: Syntheticpolypeptide
SYQQKKFCFSIQQGLNADYVKGENLEAVVCEEPQ

SEQ ID NO: 220 - protein, 34 aa, synthetic construct
  REGION 1..34: note = Description of Artificial Sequence: Syntheticpolypeptide
MDGSGERSLPEPGSQSSAASDDIEIVVNVGGVRQ

SEQ ID NO: 221 - protein, 34 aa, synthetic construct
  REGION 1..34: note = Description of Artificial Sequence: Syntheticpolypeptide
RWCSKKKDAAVMNQEPAGHRTVNREDSDEQDPQE

SEQ ID NO: 222 - protein, 35 aa, synthetic construct
  REGION 1..35: note = Description of Artificial Sequence: Syntheticpolypeptide
MFCSEKKLREVERIVKANDREYNEKFQYADNRIHT

SEQ ID NO: 223 - protein, 35 aa, synthetic construct
  REGION 1..35: note = Description of Artificial Sequence: Syntheticpolypeptide
TQFSETKQRESQLMREQRVRFLSNASTLASFSEPG

SEQ ID NO: 224 - protein, 35 aa, synthetic construct
  REGION 1..35: note = Description of Artificial Sequence: Syntheticpolypeptide
NWLNPPRLQMGSMTSTTLYNSMWFVYGSFVQQGGE

SEQ ID NO: 225 - protein, 35 aa, synthetic construct
  REGION 1..35: note = Description of Artificial Sequence: Syntheticpolypeptide
CFYIKKINPLKEKSIILPKSLISVVRSATLETKPE

SEQ ID NO: 226 - protein, 35 aa, synthetic construct
  REGION 1..35: note = Description of Artificial Sequence: Syntheticpolypeptide
HRWCANKKNAVVMDQEPAGNRTVNREDSDEQDPQE

SEQ ID NO: 227 - protein, 36 aa, synthetic construct
  REGION 1..36: note = Description of Artificial Sequence: Syntheticpolypeptide
NYYSSCRKPTTTKKTTSLLHPDSSRWIPERISLQAP

SEQ ID NO: 228 - protein, 36 aa, synthetic construct
  REGION 1..36: note = Description of Artificial Sequence: Syntheticpolypeptide
HLTALFLTVYEWRSPYGLTPRGRNRSTVFSYSSALN

SEQ ID NO: 229 - protein, 36 aa, synthetic construct
  REGION 1..36: note = Description of Artificial Sequence: Syntheticpolypeptide
YFFIRTLQAHHDRSERESPFSGSSRQPDSLSSIENA

SEQ ID NO: 230 - protein, 36 aa, synthetic construct
  REGION 1..36: note = Description of Artificial Sequence: Syntheticpolypeptide
LHCCCSNKKNAAVMDQEPAGDRTVNREDSDDQDPQE

SEQ ID NO: 231 - protein, 36 aa, synthetic construct
  REGION 1..36: note = Description of Artificial Sequence: Syntheticpolypeptide
HYLRFQRKSIDGSFGSNDGSGNMVASHPIAASTPEG

SEQ ID NO: 232 - protein, 37 aa, synthetic construct
  REGION 1..37: note = Description of Artificial Sequence: Syntheticpolypeptide
RWWNQYENLPWPDRLMSLVSGFVEGKDEQGRLLRRTL

SEQ ID NO: 233 - protein, 37 aa, synthetic construct
  REGION 1..37: note = Description of Artificial Sequence: Syntheticpolypeptide
DVDVDDTTEEQGYGMAYTVHKWSELSWASHWVTFGCW

SEQ ID NO: 234 - protein, 38 aa, synthetic construct
  REGION 1..38: note = Description of Artificial Sequence: Syntheticpolypeptide
RYCWLRRQAALQRRLSAMEKGKLHKPGKDASKRGRQTP

SEQ ID NO: 235 - protein, 38 aa, synthetic construct
  REGION 1..38: note = Description of Artificial Sequence: Syntheticpolypeptide
MKKAEMGRFSISPDEDSSSYSSNSDFNYSYPTKQAALK

SEQ ID NO: 236 - protein, 39 aa, synthetic construct
  REGION 1..39: note = Description of Artificial Sequence: Syntheticpolypeptide
LKCLIVALPKIILAVKSKGKFYLVIEELSQLFRSLVPIQ

SEQ ID NO: 237 - protein, 39 aa, synthetic construct
  REGION 1..39: note = Description of Artificial Sequence: Syntheticpolypeptide
ETLLNAPRAMGTSSSPPSPASVVAPGTTLFEESRLPVFT

SEQ ID NO: 238 - protein, 40 aa, synthetic construct
  REGION 1..40: note = Description of Artificial Sequence: Syntheticpolypeptide
YVRSWRKAGPLPSQIPPTAPGGEQCPLYANVHHQKGKDEG

SEQ ID NO: 239 - protein, 40 aa, synthetic construct
  REGION 1..40: note = Description of Artificial Sequence: Syntheticpolypeptide
TYLSEPLVRGYTTAAAVQVFVSQLKYVFGLHLSSHSGPLS

SEQ ID NO: 240 - protein, 37 aa, synthetic construct
  REGION 1..37: note = Description of Artificial Sequence: Syntheticpolypeptide
RWWSQYTSIPLPDQLMCVISASVHGVDQRGRLLRRTL

SEQ ID NO: 241 - protein, 41 aa, synthetic construct
  REGION 1..41: note = Description of Artificial Sequence: Syntheticpolypeptide
RRFRQACLETCARCCPRPPRARPRALPDEDPPTPSIASLSR

SEQ ID NO: 242 - protein, 36 aa, synthetic construct
  REGION 1..36: note = Description of Artificial Sequence: Syntheticpolypeptide
MAEAITYADLRFVKAPLKKSISSRLGQDPGADDDGE

SEQ ID NO: 243 - protein, 41 aa, synthetic construct
  REGION 1..41: note = Description of Artificial Sequence: Syntheticpolypeptide
MQTSEREGSGPELSPSVMPEAPLESPPFPTKSPAFDLFNLV

SEQ ID NO: 244 - protein, 42 aa, synthetic construct
  REGION 1..42: note = Description of Artificial Sequence: Syntheticpolypeptide
SKEKQFRGLQSRIEQEQKFTVIRGGQVIQIPVADITVGDIAQ

SEQ ID NO: 245 - protein, 42 aa, synthetic construct
  REGION 1..42: note = Description of Artificial Sequence: Syntheticpolypeptide
SKEKQFRGLQSRIEQEQKFTVVRAGQVVQIPVAEIVVGDIAQ

SEQ ID NO: 246 - protein, 42 aa, synthetic construct
  REGION 1..42: note = Description of Artificial Sequence: Syntheticpolypeptide
SKEKQFRGLQCRIEQEQKFSIIRNGQLIQLPVAEIVVGDIAQ

SEQ ID NO: 247 - protein, 42 aa, synthetic construct
  REGION 1..42: note = Description of Artificial Sequence: Syntheticpolypeptide
KCLQGNADGDGGGGQCCRRQDSPSPDFYKQSSPNLQVSSDGT

SEQ ID NO: 248 - protein, 43 aa, synthetic construct
  REGION 1..43: note = Description of Artificial Sequence: Syntheticpolypeptide
SSECQRYVYSILCCKESSDPSSYNSSGQLMASKMDTCSSNLNN

SEQ ID NO: 249 - protein, 37 aa, synthetic construct
  REGION 1..37: note = Description of Artificial Sequence: Syntheticpolypeptide
MDNQGVIYSDLNLPPNPKRQQRKPKGNKNSILATEQE

SEQ ID NO: 250 - protein, 43 aa, synthetic construct
  REGION 1..43: note = Description of Artificial Sequence: Syntheticpolypeptide
WWGDIWWKTMMELRSLDTQKATCHLQQVTDLPWTSVSSPVERE

SEQ ID NO: 251 - protein, 43 aa, synthetic construct
  REGION 1..43: note = Description of Artificial Sequence: Syntheticpolypeptide
RLLFSKTYKLQERSDLTVKEKEELIEEWQPEPLVPPVPKDHPA

SEQ ID NO: 252 - protein, 44 aa, synthetic construct
  REGION 1..44: note = Description of Artificial Sequence: Syntheticpolypeptide
KYYPINMDFKPNFITTYKCECVAPDTVNTTVFNASAPLAPDTNA

SEQ ID NO: 253 - protein, 44 aa, synthetic construct
  REGION 1..44: note = Description of Artificial Sequence: Syntheticpolypeptide
CIRRSCLHRRRTFTYQSGSGEETILQFSSGTLTLTRRPKLQPEP

SEQ ID NO: 254 - protein, 45 aa, synthetic construct
  REGION 1..45: note = Description of Artificial Sequence: Syntheticpolypeptide
MTNPSDRVLPANSMAESREGDFGCTVMELRKLMELRSRDALTQIN

SEQ ID NO: 255 - protein, 45 aa, synthetic construct; identical to SEQ ID NO: 10
  REGION 1..45: note = Description of Artificial Sequence: Syntheticpolypeptide

SEQ ID NO: 256 - protein, 45 aa, synthetic construct
  REGION 1..45: note = Description of Artificial Sequence: Syntheticpolypeptide
WCQCCPHTCCCYVRCPCCPDKCCCPEALYAAGKAATSGVPSIYAP

SEQ ID NO: 257 - protein, 45 aa, synthetic construct
  REGION 1..45: note = Description of Artificial Sequence: Syntheticpolypeptide
AVCQCRRKNYGQLDIFPARDTYHPMSEYPTYHTHGRYVPPSSTDR

SEQ ID NO: 258 - protein, 46 aa, synthetic construct
  REGION 1..46: note = Description of Artificial Sequence: Syntheticpolypeptide
TVVLRVQFPSWNGLGSIPSTDIYKSTKNYKNIEEPQGVKILRFSSP

SEQ ID NO: 259 - protein, 47 aa, synthetic construct
  REGION 1..47: note = Description of Artificial Sequence: Syntheticpolypeptide
DNTVPGSPEERGLIQWKAGAHANSDMSSSLKSYDFPIGMGIVKRITF

SEQ ID NO: 260 - protein, 47 aa, synthetic construct
  REGION 1..47: note = Description of Artificial Sequence: Syntheticpolypeptide
YRCSQHSSSSEESTKRTSHSKLPEQEAAEADLSNMERVSLSTADPQG

SEQ ID NO: 261 - protein, 48 aa, synthetic construct
  REGION 1..48: note = Description of Artificial Sequence: Syntheticpolypeptide
GLKGIRSALKRPVEQPLGEIPEKSLHSIAVSSIQKAKGYQLLEEEKIV

SEQ ID NO: 262 - protein, 48 aa, synthetic construct
  REGION 1..48: note = Description of Artificial Sequence: Syntheticpolypeptide
RWRRRKGQQRTKATTPAREPFQNTEEPYENIRNEGQNTDPKLNPKDDG

SEQ ID NO: 263 - protein, 49 aa, synthetic construct
  REGION 1..49: note = Description of Artificial Sequence: Syntheticpolypeptide
RFTGHPGAYLRLINRWRLEECHPSGCLIDLCMQMGIIMVLKQTWNNFME

SEQ ID NO: 264 - protein, 49 aa, synthetic construct
  REGION 1..49: note = Description of Artificial Sequence: Syntheticpolypeptide
VVALIYCRKKRISALPGYPECREMGETLPEKPANPTNPDEADKVGAENT

SEQ ID NO: 265 - protein, 49 aa, synthetic construct
  REGION 1..49: note = Description of Artificial Sequence: Syntheticpolypeptide
SYRYVTKPPAPPNSLNVQRVLTFQPLRFIQEHVLIPVFDLSGPSSLAQP

SEQ ID NO: 266 - protein, 49 aa, synthetic construct; identical to SEQ ID NO: 11
  REGION 1..49: note = Description of Artificial Sequence: Syntheticpolypeptide

SEQ ID NO: 267 - protein, 49 aa, synthetic construct
  REGION 1..49: note = Description of Artificial Sequence: Syntheticpolypeptide
TLRNATQQKDMVEVADFDFSPMSDKNPEPPSGVRCCCQMCCGPFLLETP

SEQ ID NO: 268 - protein, 62 aa, synthetic construct
  REGION 1..62: note = Description of Artificial Sequence: Syntheticpolypeptide
HRQNQIKQGPPRSKDEEQKPQQRPDLAVDVLERTADKATVNGLPEKDRETDTSALAAGSSQE

SEQ ID NO: 269 - protein, 50 aa, synthetic construct
  REGION 1..50: note = Description of Artificial Sequence: Syntheticpolypeptide
MDEEEDGAGAEESGQPRSFMRLNDLSGAGGRPGPGSAEKDPGSADSEAEG

SEQ ID NO: 270 - protein, 50 aa, synthetic construct
  REGION 1..50: note = Description of Artificial Sequence: Syntheticpolypeptide
EMLHLGFGTIRDSLNSKRRELEDPGAYNYPFTWNTPSAPPGYNIAVKPDQ

SEQ ID NO: 271 - protein, 51 aa, synthetic construct
  REGION 1..51: note = Description of Artificial Sequence: Syntheticpolypeptide
AKTGRTSIQRDLKEQQPQALAPGRGPSHSSAFSMSPLSTAQAPLPNPRTAA

SEQ ID NO: 272 - protein, 51 aa, synthetic construct
  REGION 1..51: note = Description of Artificial Sequence: Syntheticpolypeptide
LCLRKQSNGREAEYSDKHGQYLIGHGTKVYIDPFTYEDPNEAVREFAKEID

SEQ ID NO: 273 - protein, 51 aa, synthetic construct
  REGION 1..51: note = Description of Artificial Sequence: Syntheticpolypeptide
KNFRRDFFILLSKCGCYEMQAQIYRTETSSTVHNTHPRNGHCSSAPRVTNG

SEQ ID NO: 274 - protein, 51 aa, synthetic construct
  REGION 1..51: note = Description of Artificial Sequence: Syntheticpolypeptide
QDIGYFLKVAAVGRRVRSYGKRRPARTILRAFLEKARQTPHKPFLLFRDET

SEQ ID NO: 275 - protein, 54 aa, synthetic construct
  REGION 1..54: note = Description of Artificial Sequence: Syntheticpolypeptide
MSAARPQFSIDDAFELSLEDGGPGPESSGVARFGPLHFERRARFEVADEDKQSR

SEQ ID NO: 276 - protein, 55 aa, synthetic construct
  REGION 1..55: note = Description of Artificial Sequence: Syntheticpolypeptide
YAATSRQLKRLESVSRSPIYSHFSETVTGASVIRAYNRSRDFEIISDTKVDANQR

SEQ ID NO: 277 - protein, 55 aa, synthetic construct
  REGION 1..55: note = Description of Artificial Sequence: Syntheticpolypeptide
MTVPKEMPEKWARAQAPPSWSRKKPSWGTEEERRARANDREYNEKFQYASNCIKT

SEQ ID NO: 278 - protein, 55 aa, synthetic construct; identical to SEQ ID NO: 12
  REGION 1..55: note = Description of Artificial Sequence: Syntheticpolypeptide

SEQ ID NO: 279 - protein, 55 aa, synthetic construct; identical to SEQ ID NO: 14
  REGION 1..55: note = Description of Artificial Sequence: Syntheticpolypeptide

SEQ ID NO: 280 - protein, 55 aa, synthetic construct; identical to SEQ ID NO: 13
  REGION 1..55: note = Description of Artificial Sequence: Syntheticpolypeptide

SEQ ID NO: 281 - protein, 56 aa, synthetic construct
  REGION 1..56: note = Description of Artificial Sequence: Syntheticpolypeptide
MKFEEKCGDNGSIVGRNQSYPGEKHQPKGKPIANGEAEVYAKQEANGKCSTPRKSL

SEQ ID NO: 282 - protein, 56 aa, synthetic construct
  REGION 1..56: note = Description of Artificial Sequence: Syntheticpolypeptide
DIKINQYIIKKCSPCCACLAKAMERSEQQPLMGWEDEGQPFIRRQSRTDSGIFYED

SEQ ID NO: 283 - protein, 56 aa, synthetic construct
  REGION 1..56: note = Description of Artificial Sequence: Syntheticpolypeptide
MAEPQAESEPLLGGARGGGGDWPAGLTTYRSIQVGPGAAARWDLCIDQAVVFIEDA

SEQ ID NO: 284 - protein, 57 aa, synthetic construct
  REGION 1..57: note = Description of Artificial Sequence: Syntheticpolypeptide
AVTISLAYSVKKMMKDNNLVRHLDACETMGNATAICSDKTGTLTTNRMTVVQAYVGD

SEQ ID NO: 285 - protein, 57 aa, synthetic construct
  REGION 1..57: note = Description of Artificial Sequence: Syntheticpolypeptide
AVTISLAYSVKKMMKDNNLVRHLDACETMGNATAICSDKTGTLTMNRMTVVQAYIGG

SEQ ID NO: 286 - protein, 57 aa, synthetic construct
  REGION 1..57: note = Description of Artificial Sequence: Syntheticpolypeptide
SNMKSRSAGKLWELQHEIEVYRKTVIAQWRALDLDVVLTPMLAPALDLNAPGRATGA

SEQ ID NO: 287 - protein, 57 aa, synthetic construct
  REGION 1..57: note = Description of Artificial Sequence: Syntheticpolypeptide
HPELNVQKRKRSFKAVVTAATMSSRLSHKPSDRPNGEAKTELCENVDPNSPAAKKKY

SEQ ID NO: 288 - protein, 57 aa, synthetic construct
  REGION 1..57: note = Description of Artificial Sequence: Syntheticpolypeptide
RKSNFIFDKLHKVGIKTRRQWRRSQFCDINILAMFCNENRDHIKSLNRLDFITNESD

SEQ ID NO: 289 - protein, 57 aa, synthetic construct; identical to SEQ ID NO: 15
  REGION 1..57: note = Description of Artificial Sequence: Syntheticpolypeptide

SEQ ID NO: 290 - protein, 58 aa, synthetic construct
  REGION 1..58: note = Description of Artificial Sequence: Syntheticpolypeptide
SGKTLESWRSLCTRCCWASKGAAVGGGAGATAAGGGGGPGGGGGGGPGGGGGPGGGGG

SEQ ID NO: 291 - protein, 58 aa, synthetic construct
  REGION 1..58: note = Description of Artificial Sequence: Syntheticpolypeptide
RSCRKKSARPAADVGDIGMKDANTIRGSASQGNLTESWADDNPRHHGLAAHSSGEERE

SEQ ID NO: 292 - protein, 58 aa, synthetic construct
  REGION 1..58: note = Description of Artificial Sequence: Syntheticpolypeptide
MKSKMRQALGFAKEARESPDTQALLTCAEKEEENQENLDWVPLTTLSHCKSLRTMTAI

SEQ ID NO: 293 - protein, 58 aa, synthetic construct
  REGION 1..58: note = Description of Artificial Sequence: Syntheticpolypeptide
AILFAVVARGTTILAKHAWCGGNFLEVTEQILAKIPSENNKLTYSHGNYLFHYICQDR

SEQ ID NO: 294 - protein, 59 aa, synthetic construct
  REGION 1..59: note = Description of Artificial Sequence: Syntheticpolypeptide
MDHAEENEILAATQRYYVERPIFSHPVLQERLHTKDKVPDSIADKLKQAFTCTPKKIRN

SEQ ID NO: 295 - protein, 60 aa, synthetic construct
  REGION 1..60: note = Description of Artificial Sequence: Syntheticpolypeptide
KKLVKKFRQKKQRQWIGPTGMNQNMSFHRNHTATVRSHAENPTASHVDNEYSQPPRNSHL

SEQ ID NO: 296 - protein, 60 aa, synthetic construct
  REGION 1..60: note = Description of Artificial Sequence: Syntheticpolypeptide
MPRRLQPRGAGTKGPPAPAPAASGAARNSHSAASRDPPASAKPLLRWDEVPDDFVECFIL

SEQ ID NO: 297 - protein, 60 aa, synthetic construct
  REGION 1..60: note = Description of Artificial Sequence: Syntheticpolypeptide
RSCRKKSARPAVGVGDTGMEDANAVRGSASQGPLIESPADDSPPHHAPPALATPSPEEGE

SEQ ID NO: 298 - protein, 61 aa, synthetic construct
  REGION 1..61: note = Description of Artificial Sequence: Syntheticpolypeptide
DNFEYLTRDSSILGPHHLDEFIRVWAEYDPAACGRISYNDMFEMLKHMSPPLGLGKKCPAR

SEQ ID NO: 299 - protein, 61 aa, synthetic construct
  REGION 1..61: note = Description of Artificial Sequence: Syntheticpolypeptide
SKRWTHLPCGCIINCRQNAYAVASDGKKIKRKGFEFNLSFQKSYGIYKIAHEDYYDDDENS

SEQ ID NO: 300 - protein, 45 aa, synthetic construct
  REGION 1..45: note = Description of Artificial Sequence: Syntheticpolypeptide
NFNYFYHRETEGEEQSQYMHVGSCQHLSSSAEELRKARSNSTLSK

SEQ ID NO: 301 - protein, 61 aa, synthetic construct; identical to SEQ ID NO: 17
  REGION 1..61: note = Description of Artificial Sequence: Syntheticpolypeptide

SEQ ID NO: 302 - protein, 63 aa, synthetic construct
  REGION 1..63: note = Description of Artificial Sequence: Syntheticpolypeptide
LKLANEETIKNITHWTLFNYYNSSGWNESVPRPPLHPADVPRGSCWETAVGIEFMRLTVSDML

SEQ ID NO: 303 - protein, 64 aa, synthetic construct
  REGION 1..64: note = Description of Artificial Sequence: Syntheticpolypeptide
MCHSRSCHPTMTILQAPTPAPSTIPGPRRGSGPEIFTFDPLPEPAAAPAGRPSASRGHRKRSRR

SEQ ID NO: 304 - protein, 64 aa, synthetic construct
  REGION 1..64: note = Description of Artificial Sequence: Syntheticpolypeptide
ASSAASSEHFEKLHEIFRGLHEDLQGVPERLLGTAGTEEKKKLIRDFDEKQQEANETLAEMEEE

SEQ ID NO: 305 - protein, 66 aa, synthetic construct
  REGION 1..66: note = Description of Artificial Sequence: Syntheticpolypeptide
MADQIPLYPVRSAAAAAANRKRAAYYSAAGPRPGADRHSRYQLEDESAHLDEMPLMMSEEGFENEE

SEQ ID NO: 306 - protein, 66 aa, synthetic construct
  REGION 1..66: note = Description of Artificial Sequence: Syntheticpolypeptide
SMILSASVIRVRDGLPLSASTDYEQSTGMQECRKYFKMLSRKLAQLPDRCTLKTGHYNINFISSLG

SEQ ID NO: 307 - protein, 66 aa, synthetic construct
  REGION 1..66: note = Description of Artificial Sequence: Syntheticpolypeptide
LTRKKKALRIHSVEGDLRRKSAGQEEWSPSAPSPPGSCVQAEAAPAGLCGEQRGEDCAELHDYFNV

SEQ ID NO: 308 - protein, 67 aa, synthetic construct
  REGION 1..67: note = Description of Artificial Sequence: Syntheticpolypeptide
TIPTSRLKFLKEAGRLTQKEEIPEEELNEDVEEIDHAERELRRGQILWFRGLNRIQTQIRVVKAFRS

SEQ ID NO: 309 - protein, 67 aa, synthetic construct
  REGION 1..67: note = Description of Artificial Sequence: Syntheticpolypeptide
TIPTSQLKCLKEAGHGPGKDEMTDEELAEGEEEIDHAERELRRGQILWFRGLNRIQTQIRVVKAFRS

SEQ ID NO: 310 - protein, 67 aa, synthetic construct; identical to SEQ ID NO: 18
  REGION 1..67: note = Description of Artificial Sequence: Syntheticpolypeptide

SEQ ID NO: 311 - protein, 67 aa, synthetic construct
  REGION 1..67: note = Description of Artificial Sequence: Syntheticpolypeptide
MGDTHWRVAQERDELWRAQVVATTVMLERKLPRCLWPRSGICGCEFGLGDRWFLRVENHNDQNPLRV

SEQ ID NO: 312 - protein, 68 aa, synthetic construct
  REGION 1..68: note = Description of Artificial Sequence: Syntheticpolypeptide
YSPGDYICKKGDIGREMYIIKEGKLAVVADDGVTQFVVLSDGSYFGEISILNIKGSKAGNRRTANIKS

SEQ ID NO: 313 - protein, 68 aa, synthetic construct
  REGION 1..68: note = Description of Artificial Sequence: Syntheticpolypeptide
FSPGDYICRKGDIGKEMYIIKEGKLAVVADDGVTQYALLSAGSCFGEISILNIKGSKMGNRRTANIRS

SEQ ID NO: 314 - protein, 68 aa, synthetic construct
  REGION 1..68: note = Description of Artificial Sequence: Syntheticpolypeptide
CLKIIKEYERAVVFRLGRIQADKAKGPGLILVLPCIDVFVKVDLRTVTCNIPPQEILTRDSVTTQVDG

SEQ ID NO: 315 - protein, 69 aa, synthetic construct
  REGION 1..69: note = Description of Artificial Sequence: Syntheticpolypeptide
MTEGARAADEVRVPLGAPPPGPAALVGASPESPGAPGREAERGSELGVSPSESPAAERGAELGADEEQR

SEQ ID NO: 316 - protein, 70 aa, synthetic construct; identical to SEQ ID NO: 19
  REGION 1..70: note = Description of Artificial Sequence: Syntheticpolypeptide

SEQ ID NO: 317 - protein, 73 aa, synthetic construct
  REGION 1..73: note = Description of Artificial Sequence: Syntheticpolypeptide
VITTCLALGTRRMAKKNAIVRSLPSVETLGCTSVICSDKTGTLTTNQMSVCRMFILDRVEGDTCSLNEFTITG

SEQ ID NO: 318 - protein, 73 aa, synthetic construct
  REGION 1..73: note = Description of Artificial Sequence: Syntheticpolypeptide
MEAVLNELVSVEDLLKFEKKFQSEKAAGSVSKSTQFEYAWCLVRSKYNDDIRKGIVLLEELLPKGSKEEQRDY

SEQ ID NO: 319 - protein, 75 aa, synthetic construct
  REGION 1..75: note = Description of Artificial Sequence: Syntheticpolypeptide
TRPKPLKPPCDLSMQSVEVAGSGGARRSALLDSDEPLVYFYDDVTTLYEGFQRGIQVSNNGPCLGSRKPDQPYEW

SEQ ID NO: 320 - protein, 75 aa, synthetic construct
  REGION 1..75: note = Description of Artificial Sequence: Syntheticpolypeptide
HRPKALQPPCNLLMQSEEVEDSGGARRSVIGSGPQLLTHYYDDARTMYQVFRRGLSISGNGPCLGFRKPKQPYQW

SEQ ID NO: 321 - protein, 76 aa, synthetic construct; identical to SEQ ID NO: 20
  REGION 1..76: note = Description of Artificial Sequence: Syntheticpolypeptide

SEQ ID NO: 322 - protein, 76 aa, synthetic construct
  REGION 1..76: note = Description of Artificial Sequence: Syntheticpolypeptide
WSCERYRADVRTVWEQCVAIMSEEDGDDDGGCDDYAEGRVCKVRFDANGATGPGSRDPAQVKLLPGRHMLFPPLER

SEQ ID NO: 323 - protein, 73 aa, synthetic construct
  REGION 1..73: note = Description of Artificial Sequence: Syntheticpolypeptide
GPLVRYLDVKKTNKKESINEELHIRLMDHLKAGIEDVCGHWSHYQVRDKFKKFDHRYLRKILIRKNLPKSSIV

SEQ ID NO: 324 - protein, 79 aa, synthetic construct
  REGION 1..79: note = Description of Artificial Sequence: Syntheticpolypeptide
KYPTLLHQRKKQRFLSKHISHRGGAGENLENTMAAFQHAVKIGTDMLELDCHITKDEQVVVSHDENLKRATGVNVNISD

SEQ ID NO: 325 - protein, 79 aa, synthetic construct
  REGION 1..79: note = Description of Artificial Sequence: Syntheticpolypeptide
AHDHYTVDVVVAYYITTRLFWWYHTMANQQVLKEASQMNLLARVWWYRPFQYFEKNVQGIVPRSYHWPFPWPVVHLSRQ

SEQ ID NO: 326 - protein, 79 aa, synthetic construct
  REGION 1..79: note = Description of Artificial Sequence: Syntheticpolypeptide
SKASRAPRAHRDINVPRALVDILRHQAGPGTRPDRARSSSLTPGIGGPDSMPPRTPKNLYNTVKTPNLDWRALPPPSPS

SEQ ID NO: 327 - protein, 80 aa, synthetic construct
  REGION 1..80: note = Description of Artificial Sequence: Syntheticpolypeptide
FKVYKWKQSRDLYRAPVSSLYRTPGPSLHADAVRGGLMSPHLYHQVYLTTDSRRSDPLLKKPGAASPLASRQNTLRSCDP

SEQ ID NO: 328 - protein, 81 aa, synthetic construct
  REGION 1..81: note = Description of Artificial Sequence: Syntheticpolypeptide
MLCRKTSQQEHVYEAARAHAREANDSGETMRVAIFASGCSSDEPTSQNLGNNYSDEPCIGQEYQIIAQINGNYARLLDTVP

SEQ ID NO: 329 - protein, 82 aa, synthetic construct
  REGION 1..82: note = Description of Artificial Sequence: Syntheticpolypeptide
KQKNEHHHGHSHYASESLPSKKDQEEGVMEKLQNGDLDHMIPQHCSSELDGKAPMVDEKVIVGSLSVQDLQASQSACYWLKG

SEQ ID NO: 330 - protein, 83 aa, synthetic construct
  REGION 1..83: note = Description of Artificial Sequence: Syntheticpolypeptide
HKALMERALRATFREALSSLHSRRRLDTEKKHQEHLLLSILPAYLAREMKAEIMARLQAGQGSRPESTNNFHSLYVKRHQGVS

SEQ ID NO: 331 - protein, 83 aa, synthetic construct
  REGION 1..83: note = Description of Artificial Sequence: Syntheticpolypeptide
HKHQMQDASRDLFTYTVKCIQIRRKLRIEKRQQENLLLSVLPAHISMGMKLAIIERLKEHGDRRCMPDNNFHSLYVKRHQNVS

SEQ ID NO: 332 - protein, 84 aa, synthetic construct
  REGION 1..84: note = Description of Artificial Sequence: Syntheticpolypeptide
ERFVAKPCAIALNIQANGPQIAPPNAILEKVFTAITKHPDEKRLEGLSKQLDWDVRSIQRWFRQRRNQEKPSTLTRFCESMWRF

SEQ ID NO: 333 - protein, 84 aa, synthetic construct
  REGION 1..84: note = Description of Artificial Sequence: Syntheticpolypeptide
AWRLWRCRVARSRELNKPWAAQDGPKPGLGLQPRYGSRSAPKPQVAVPSCPSTPDYENMFVGQPAAEHQWDEQGAHPSEDNDFY

SEQ ID NO: 334 - protein, 84 aa, synthetic construct
  REGION 1..84: note = Description of Artificial Sequence: Syntheticpolypeptide
HLSQWTRGRSRSHPGQGRSGESVEEVPLYGNLHYLQTGRLSQDPEPDQQDPTLGGPARAAEEVMCYTSLQLRPPQGRIPGPGTP

SEQ ID NO: 335 - protein, 85 aa, synthetic construct
  REGION 1..85: note = Description of Artificial Sequence: Syntheticpolypeptide
KKRHCGYSKAFQDSDEEKMHYQNGQAPPPVFLPLHHPPGKLPEPQFYAEPHTYEEPGRAGRSFTREIEASRIHIEKIIGSGDSGE

SEQ ID NO: 336 - protein, 85 aa, synthetic construct; identical to SEQ ID NO: 21
  REGION 1..85: note = Description of Artificial Sequence: Syntheticpolypeptide

SEQ ID NO: 337 - protein, 86 aa, synthetic construct
  REGION 1..86: note = Description of Artificial Sequence: Syntheticpolypeptide
MASPGAGRAPPELPERNCGYREVEYWDQRYQGAADSAPYDWFGDFSSFRALLEPELRPEDRILVLGCGNSALSYELFLGGFPNVTS

SEQ ID NO: 338 - protein, 86 aa, synthetic construct
  REGION 1..86: note = Description of Artificial Sequence: Syntheticpolypeptide
MPHFTVVPVDGPRRGDYDNLEGLSWVDYGERAELDDSDGHGNHRESSPFLSPLEASRGIDYYDRNLALFEEELDIRPKVSSLLGKL

SEQ ID NO: 339 - protein, 89 aa, synthetic construct
  REGION 1..89: note = Description of Artificial Sequence: Syntheticpolypeptide
AIPTRSLKFLKEAGHGTTKEEITKDAEGLDEIDHAEMELRRGQILWFRGLNRIQTQIDVINTFQTGASFKGVLRRQNMGQHLDVKLVPS

SEQ ID NO: 340 - protein, 89 aa, synthetic construct
  REGION 1..89: note = Description of Artificial Sequence: Syntheticpolypeptide
IFMKTAQAHRRAETLIFSKHAVIALRHGRLCFMLRVGDLRKSMIISATIHMQVVRKTTSPEGEVVPLHQVDIPMENGVGGNSIFLVAPL

SEQ ID NO: 341 - protein, 89 aa, synthetic construct
  REGION 1..89: note = Description of Artificial Sequence: Syntheticpolypeptide
SWKRYPASMKQLQQRSLMRRHRKKKRQSLKQMTPSTQEFYVDYKPTNTETSEMLLNGTGPCTYNKSGSRECEIPLSMNVSTFLAYDQPT

SEQ ID NO: 342 - protein, 91 aa, synthetic construct
  REGION 1..91: note = Description of Artificial Sequence: Syntheticpolypeptide
MANVSKKVSWSGRDRDDEEAAPLLRRTARPGGGTPLLNGAGPGAARQSPRSALFRVGHMSSVELDDELLDPDMDPPHPFPKEIPHNEKLLS

SEQ ID NO: 343 - protein, 92 aa, synthetic construct
  REGION 1..92: note = Description of Artificial Sequence: Syntheticpolypeptide
RLFKRRQGRIFPEGSCLNTFTKNPYAASKKTIYTYIMASRNTQPAESRIYDEILQSKVLPSKEEPVNTVYSEVQFADKMGKASTQDSKPPGT

SEQ ID NO: 344 - protein, 59 aa, synthetic construct
  REGION 1..59: note = Description of Artificial Sequence: Syntheticpolypeptide
AMCLWKNRQQNTIQKYDPPGYLYQGSDMNGQMVDYTTLSGASQINGNVHGGFLTNGGLS

SEQ ID NO: 345 - protein, 92 aa, synthetic construct
  REGION 1..92: note = Description of Artificial Sequence: Syntheticpolypeptide
LGSGFALKVQEQHRQKHFEKRRMPAANLIQAAWRLYSTDMSRAYLTATWYYYDSILPSFRELALLFEHVQRARNGGLRPLEVRRAPVPDGAP

SEQ ID NO: 346 - protein, 94 aa, synthetic construct
  REGION 1..94: note = Description of Artificial Sequence: Syntheticpolypeptide
MSSHKGSVVAQGNGAPASNREADTVELAELGPLLEEKGKRVIANPPKAEEEQTCPVPQEEEEEVRVLTLPLQAHHAMEKMEEFVYKVWEGRWRV

SEQ ID NO: 347 - protein, 69 aa, synthetic construct
  REGION 1..69: note = Description of Artificial Sequence: Syntheticpolypeptide
WRMMKYQQKAAGMSPEQVLQPLEGDLCYADLTLQLAGTSPQKATTKLSSAQVDQVEVEYVTMASLPKED

SEQ ID NO: 348 - protein, 95 aa, synthetic construct
  REGION 1..95: note = Description of Artificial Sequence: Syntheticpolypeptide
HYARARRKPGGLSATGTSSHSPSECQEPSSSRPSRIDPQEPTHSKPLAPMELEPMYSNVNPGDSNPIYSQIWSIQHTKENSANCPMMHQEHEELT

SEQ ID NO: 349 - protein, 95 aa, synthetic construct
  REGION 1..95: note = Description of Artificial Sequence: Syntheticpolypeptide
MAKRKQGNRLGVCGRFLSSRVSGMNPSSVVHHVSDSGPAAELPLDVPHIRLDSPPSFDNTTYTSLPLDSPSGKPSLPAPSSLPPLPPKVLVCSKP

SEQ ID NO: 350 - protein, 99 aa, synthetic construct
  REGION 1..99: note = Description of Artificial Sequence: Syntheticpolypeptide
SPNRKNPLWPSVPDPAHSSLGSWVPTIMEEDAFQLPGLGTPPITKLTVLEEDEKKPVPWESHNSSETCGLPTLVQTYVLQGDPRAVSTQPQSQSGTSDQ

SEQ ID NO: 351 - protein, 156 aa, synthetic construct; identical to SEQ ID NO: 26
  REGION 1..156: note = Description of Artificial Sequence: Syntheticpolypeptide

SEQ ID NO: 352 - protein, 4 aa, synthetic construct
  REGION 1..4: note = Description of Artificial Sequence: Syntheticpeptide
QGVQ

SEQ ID NO: 353 - protein, 4 aa, synthetic construct
  REGION 1..4: note = Description of Artificial Sequence: Syntheticpeptide
FSVR

SEQ ID NO: 354 - protein, 4 aa, synthetic construct
  REGION 1..4: note = Description of Artificial Sequence: Syntheticpeptide
YSSK

SEQ ID NO: 355 - protein, 4 aa, synthetic construct
  REGION 1..4: note = Description of Artificial Sequence: Syntheticpeptide
PKTR

SEQ ID NO: 356 - protein, 4 aa, synthetic construct
  REGION 1..4: note = Description of Artificial Sequence: Syntheticpeptide
VNDT

SEQ ID NO: 357 - protein, 4 aa, synthetic construct
  REGION 1..4: note = Description of Artificial Sequence: Syntheticpeptide
GMQQ

SEQ ID NO: 358 - protein, 4 aa, synthetic construct
  REGION 1..4: note = Description of Artificial Sequence: Syntheticpeptide
PDLL

SEQ ID NO: 359 - protein, 4 aa, synthetic construct
  REGION 1..4: note = Description of Artificial Sequence: Syntheticpeptide
HKSL

SEQ ID NO: 360 - protein, 5 aa, synthetic construct
  REGION 1..5: note = Description of Artificial Sequence: Syntheticpeptide
RQPLN

SEQ ID NO: 361 - protein, 5 aa, synthetic construct
  REGION 1..5: note = Description of Artificial Sequence: Syntheticpeptide
RTPTN

SEQ ID NO: 362 - protein, 5 aa, synthetic construct
  REGION 1..5: note = Description of Artificial Sequence: Syntheticpeptide
RNLTN

SEQ ID NO: 363 - protein, 5 aa, synthetic construct
  REGION 1..5: note = Description of Artificial Sequence: Syntheticpeptide
TVFSP

SEQ ID NO: 364 - protein, 5 aa, synthetic construct
  REGION 1..5: note = Description of Artificial Sequence: Syntheticpeptide
NRFMK

SEQ ID NO: 365 - protein, 5 aa, synthetic construct
  REGION 1..5: note = Description of Artificial Sequence: Syntheticpeptide
LNAIA

SEQ ID NO: 366 - protein, 5 aa, synthetic construct
  REGION 1..5: note = Description of Artificial Sequence: Syntheticpeptide
LFTML

SEQ ID NO: 367 - protein, 5 aa, synthetic construct
  REGION 1..5: note = Description of Artificial Sequence: Syntheticpeptide
MYVMG

SEQ ID NO: 368 - protein, 5 aa, synthetic construct
  REGION 1..5: note = Description of Artificial Sequence: Syntheticpeptide
VTGTR

SEQ ID NO: 369 - protein, 5 aa, synthetic construct
  REGION 1..5: note = Description of Artificial Sequence: Syntheticpeptide
TTHRR

SEQ ID NO: 370 - protein, 5 aa, synthetic construct
  REGION 1..5: note = Description of Artificial Sequence: Syntheticpeptide
VTRRK

SEQ ID NO: 371 - protein, 5 aa, synthetic construct
  REGION 1..5: note = Description of Artificial Sequence: Syntheticpeptide
VTPVR

SEQ ID NO: 372 - protein, 5 aa, synthetic construct
  REGION 1..5: note = Description of Artificial Sequence: Syntheticpeptide
MTVRK

SEQ ID NO: 373 - protein, 5 aa, synthetic construct
  REGION 1..5: note = Description of Artificial Sequence: Syntheticpeptide
MTVKR

SEQ ID NO: 374 - protein, 5 aa, synthetic construct
  REGION 1..5: note = Description of Artificial Sequence: Syntheticpeptide
VTPRR

SEQ ID NO: 375 - protein, 5 aa, synthetic construct
  REGION 1..5: note = Description of Artificial Sequence: Syntheticpeptide
KPWWD

SEQ ID NO: 376 - protein, 5 aa, synthetic construct
  REGION 1..5: note = Description of Artificial Sequence: Syntheticpeptide
NRLMK

SEQ ID NO: 377 - protein, 5 aa, synthetic construct
  REGION 1..5: note = Description of Artificial Sequence: Syntheticpeptide
FKETV

SEQ ID NO: 378 - protein, 6 aa, synthetic construct
  REGION 1..6: note = Description of Artificial Sequence: Syntheticpeptide
PFLKNT

SEQ ID NO: 379 - protein, 6 aa, synthetic construct
  REGION 1..6: note = Description of Artificial Sequence: Syntheticpeptide
VTQRRG

SEQ ID NO: 380 - protein, 6 aa, synthetic construct
  REGION 1..6: note = Description of Artificial Sequence: Syntheticpeptide
MTERKA

SEQ ID NO: 381 - protein, 6 aa, synthetic construct
  REGION 1..6: note = Description of Artificial Sequence: Syntheticpeptide
VTMRRT

SEQ ID NO: 382 - protein, 6 aa, synthetic construct
  REGION 1..6: note = Description of Artificial Sequence: Syntheticpeptide
RQALAE

SEQ ID NO: 383 - protein, 6 aa, synthetic construct
  REGION 1..6: note = Description of Artificial Sequence: Syntheticpeptide
APDSNT

SEQ ID NO: 384 - protein, 6 aa, synthetic construct
  REGION 1..6: note = Description of Artificial Sequence: Syntheticpeptide
SKKRGG

SEQ ID NO: 385 - protein, 6 aa, synthetic construct
  REGION 1..6: note = Description of Artificial Sequence: Syntheticpeptide
EISAAS

SEQ ID NO: 386 - protein, 6 aa, synthetic construct
  REGION 1..6: note = Description of Artificial Sequence: Syntheticpeptide
STLGPG

SEQ ID NO: 387 - protein, 6 aa, synthetic construct
  REGION 1..6: note = Description of Artificial Sequence: Syntheticpeptide
NSLSFL

SEQ ID NO: 388 - protein, 6 aa, synthetic construct
  REGION 1..6: note = Description of Artificial Sequence: Syntheticpeptide
AHLVQY

SEQ ID NO: 389 - protein, 7 aa, synthetic construct
  REGION 1..7: note = Description of Artificial Sequence: Syntheticpeptide
DEHDAII

SEQ ID NO: 390 - protein, 7 aa, synthetic construct
  REGION 1..7: note = Description of Artificial Sequence: Syntheticpeptide
VTKRCAR

SEQ ID NO: 391 - protein, 7 aa, synthetic construct
  REGION 1..7: note = Description of Artificial Sequence: Syntheticpeptide
KRIEHAK

SEQ ID NO: 392 - protein, 7 aa, synthetic construct
  REGION 1..7: note = Description of Artificial Sequence: Syntheticpeptide
VTPWRLR

SEQ ID NO: 393 - protein, 7 aa, synthetic construct
  REGION 1..7: note = Description of Artificial Sequence: Syntheticpeptide
VTPCRLR

SEQ ID NO: 394 - protein, 7 aa, synthetic construct
  REGION 1..7: note = Description of Artificial Sequence: Syntheticpeptide
RWGFSKQ

SEQ ID NO: 395 - protein, 7 aa, synthetic construct
  REGION 1..7: note = Description of Artificial Sequence: Syntheticpeptide
RGDDKDC

SEQ ID NO: 396 - protein, 7 aa, synthetic construct
  REGION 1..7: note = Description of Artificial Sequence: Syntheticpeptide
ATRMMMG

SEQ ID NO: 397 - protein, 7 aa, synthetic construct
  REGION 1..7: note = Description of Artificial Sequence: Syntheticpeptide
GPSRDPD

SEQ ID NO: 398 - protein, 8 aa, synthetic construct
  REGION 1..8: note = Description of Artificial Sequence: Syntheticpeptide
VTLPRARR

SEQ ID NO: 399 - protein, 8 aa, synthetic construct
  REGION 1..8: note = Description of Artificial Sequence: Syntheticpeptide
RLPYQLAQ

SEQ ID NO: 400 - protein, 8 aa, synthetic construct
  REGION 1..8: note = Description of Artificial Sequence: Syntheticpeptide
LGSFLIGS

SEQ ID NO: 401 - protein, 8 aa, synthetic construct
  REGION 1..8: note = Description of Artificial Sequence: Syntheticpeptide
MGDDSSNS

SEQ ID NO: 402 - protein, 8 aa, synthetic construct
  REGION 1..8: note = Description of Artificial Sequence: Syntheticpeptide
PLSHLAQN

SEQ ID NO: 403 - protein, 8 aa, synthetic construct
  REGION 1..8: note = Description of Artificial Sequence: Syntheticpeptide
ATEGKSVC

SEQ ID NO: 404 - protein, 9 aa, synthetic construct
  REGION 1..9: note = Description of Artificial Sequence: Syntheticpeptide
HNNCEKDSV

SEQ ID NO: 405 - protein, 9 aa, synthetic construct
  REGION 1..9: note = Description of Artificial Sequence: Syntheticpeptide
RTMKPLPRH

SEQ ID NO: 406 - protein, 9 aa, synthetic construct
  REGION 1..9: note = Description of Artificial Sequence: Syntheticpeptide
SQRRNPWQA

SEQ ID NO: 407 - protein, 9 aa, synthetic construct
  REGION 1..9: note = Description of Artificial Sequence: Syntheticpeptide
YPMKITGNR

SEQ ID NO: 408 - protein, 9 aa, synthetic construct
  REGION 1..9: note = Description of Artificial Sequence: Syntheticpeptide
VSHLRSPRK

SEQ ID NO: 409 - protein, 9 aa, synthetic construct
  REGION 1..9: note = Description of Artificial Sequence: Syntheticpeptide
SYPARTRKV

SEQ ID NO: 410 - protein, 9 aa, synthetic construct
  REGION 1..9: note = Description of Artificial Sequence: Syntheticpeptide
WGRLRFARK

SEQ ID NO: 411 - protein, 9 aa, synthetic construct
  REGION 1..9: note = Description of Artificial Sequence: Syntheticpeptide
VFLNKVMRG

SEQ ID NO: 412 - protein, 8 aa, synthetic construct
  REGION 1..8: note = Description of Artificial Sequence: Syntheticpeptide
SGSGYQLV

SEQ ID NO: 413 - protein, 9 aa, synthetic construct
  REGION 1..9: note = Description of Artificial Sequence: Syntheticpeptide
HSDSLGSAS

SEQ ID NO: 414 - protein, 9 aa, synthetic construct
  REGION 1..9: note = Description of Artificial Sequence: Syntheticpeptide
KATVHLAYL

SEQ ID NO: 415 - protein, 10 aa, synthetic construct
  REGION 1..10: note = Description of Artificial Sequence: Syntheticpeptide
CAEDYHWQWR

SEQ ID NO: 416 - protein, 10 aa, synthetic construct
  REGION 1..10: note = Description of Artificial Sequence: Syntheticpeptide
QRLLVKAKTQ

SEQ ID NO: 417 - protein, 10 aa, synthetic construct
  REGION 1..10: note = Description of Artificial Sequence: Syntheticpeptide
EDFLEESRNQ

SEQ ID NO: 418 - protein, 10 aa, synthetic construct
  REGION 1..10: note = Description of Artificial Sequence: Syntheticpeptide
GEKAFGWPGK

SEQ ID NO: 419 - protein, 10 aa, synthetic construct
  REGION 1..10: note = Description of Artificial Sequence: Syntheticpeptide
PTVSPFLRQR

SEQ ID NO: 420 - protein, 10 aa, synthetic construct
  REGION 1..10: note = Description of Artificial Sequence: Syntheticpeptide
PRTVLWLTIE

SEQ ID NO: 421 - protein, 10 aa, synthetic construct
  REGION 1..10: note = Description of Artificial Sequence: Syntheticpeptide
EVCWKLPQSK

SEQ ID NO: 422 - protein, 10 aa, synthetic construct
  REGION 1..10: note = Description of Artificial Sequence: Syntheticpeptide
ISNRWLSIGV

SEQ ID NO: 423 - protein, 10 aa, synthetic construct
  REGION 1..10: note = Description of Artificial Sequence: Syntheticpeptide
GNCSFFTETG

SEQ ID NO: 424 - protein, 10 aa, synthetic construct
  REGION 1..10: note = Description of Artificial Sequence: Syntheticpeptide
DSIRGYFGET

SEQ ID NO: 425 - protein, 11 aa, synthetic construct
  REGION 1..11: note = Description of Artificial Sequence: Syntheticpeptide
LHSNSFIRNNY

SEQ ID NO: 426 - protein, 11 aa, synthetic construct
  REGION 1..11: note = Description of Artificial Sequence: Syntheticpeptide
TYYSETTVTRT

SEQ ID NO: 427 - protein, 11 aa, synthetic construct
  REGION 1..11: note = Description of Artificial Sequence: Syntheticpeptide
TYYSRRTLLGV

SEQ ID NO: 428 - protein, 11 aa, synthetic construct
  REGION 1..11: note = Description of Artificial Sequence: Syntheticpeptide
SSYFLGKLLSD

SEQ ID NO: 429 - protein, 11 aa, synthetic construct
  REGION 1..11: note = Description of Artificial Sequence: Syntheticpeptide
QARLRQHYQTI

SEQ ID NO: 430 - protein, 12 aa, synthetic construct
  REGION 1..12: note = Description of Artificial Sequence: Syntheticpeptide
LVFHHMAQHLMM

SEQ ID NO: 431 - protein, 12 aa, synthetic construct
  REGION 1..12: note = Description of Artificial Sequence: Syntheticpeptide
YSTKITIPVIKR

SEQ ID NO: 432 - protein, 12 aa, synthetic construct
  REGION 1..12: note = Description of Artificial Sequence: Syntheticpeptide
TYHSERTVTFTY

SEQ ID NO: 433 - protein, 12 aa, synthetic construct
  REGION 1..12: note = Description of Artificial Sequence: Syntheticpeptide
PGSNYSEGWHIS

SEQ ID NO: 434 - protein, 12 aa, synthetic construct
  REGION 1..12: note = Description of Artificial Sequence: Syntheticpeptide
LCANKKSSVKIT

SEQ ID NO: 435 - protein, 12 aa, synthetic construct
  REGION 1..12: note = Description of Artificial Sequence: Syntheticpeptide
DGSPDYQKAKLQ

SEQ ID NO: 436 - protein, 12 aa, synthetic construct
  REGION 1..12: note = Description of Artificial Sequence: Syntheticpeptide
VRRQLPVEEPNP

SEQ ID NO: 437 - protein, 12 aa, synthetic construct
  REGION 1..12: note = Description of Artificial Sequence: Syntheticpeptide
KLNQVVRKVSAL

SEQ ID NO: 438 - protein, 12 aa, synthetic construct
  REGION 1..12: note = Description of Artificial Sequence: Syntheticpeptide
ILRDYKQSSSTL

SEQ ID NO: 439 - protein, 13 aa, synthetic construct
  REGION 1..13: note = Description of Artificial Sequence: Syntheticpeptide
DPAKYARWKPWLK

SEQ ID NO: 440 - protein, 13 aa, synthetic construct
  REGION 1..13: note = Description of Artificial Sequence: Syntheticpeptide
QLRFNKPVRYAAT

SEQ ID NO: 441 - protein, 13 aa, synthetic construct
  REGION 1..13: note = Description of Artificial Sequence: Syntheticpeptide
ELRFNKCVRLCGT

SEQ ID NO: 442 - protein, 13 aa, synthetic construct
  REGION 1..13: note = Description of Artificial Sequence: Syntheticpeptide
GLKDQVNTVGIPI

SEQ ID NO: 443 - protein, 14 aa, synthetic construct
  REGION 1..14: note = Description of Artificial Sequence: Syntheticpeptide
YKTSQNALDFNTKV

SEQ ID NO: 444 - protein, 14 aa, synthetic construct
  REGION 1..14: note = Description of Artificial Sequence: Syntheticpeptide
PSENKENSAVPVEE

SEQ ID NO: 445 - protein, 14 aa, synthetic construct
  REGION 1..14: note = Description of Artificial Sequence: Syntheticpeptide
ARTKISDDDDEHTL

SEQ ID NO: 446 - protein, 14 aa, synthetic construct
  REGION 1..14: note = Description of Artificial Sequence: Syntheticpeptide
PITKWLPAYKFKEY

SEQ ID NO: 447 - protein, 14 aa, synthetic construct
  REGION 1..14: note = Description of Artificial Sequence: Syntheticpeptide
SNLDEVGQQVERLD

SEQ ID NO: 448 - protein, 14 aa, synthetic construct
  REGION 1..14: note = Description of Artificial Sequence: Syntheticpeptide
RATASLNANEVEWF

SEQ ID NO: 449 - protein, 15 aa, synthetic construct
  REGION 1..15: note = Description of Artificial Sequence: Syntheticpeptide
EMRFSRAVRLCGTLQ

SEQ ID NO: 450 - protein, 15 aa, synthetic construct
  REGION 1..15: note = Description of Artificial Sequence: Syntheticpeptide
RICSLTASEGPQQKI

SEQ ID NO: 451 - protein, 11 aa, synthetic construct
  REGION 1..11: note = Description of Artificial Sequence: Syntheticpeptide
PLSPYGDIIEK

SEQ ID NO: 452 - protein, 15 aa, synthetic construct
  REGION 1..15: note = Description of Artificial Sequence: Syntheticpeptide
TSESKENCTGVQVAE

SEQ ID NO: 453 - protein, 15 aa, synthetic construct
  REGION 1..15: note = Description of Artificial Sequence: Syntheticpeptide
SQMNPRSPPATMCSP

SEQ ID NO: 454 - protein, 15 aa, synthetic construct
  REGION 1..15: note = Description of Artificial Sequence: Syntheticpeptide
MHPDALEEPDDQNRI

SEQ ID NO: 455 - protein, 15 aa, synthetic construct
  REGION 1..15: note = Description of Artificial Sequence: Syntheticpeptide
LSRMQHQSQECKSEE

SEQ ID NO: 456 - protein, 16 aa, synthetic construct
  REGION 1..16: note = Description of Artificial Sequence: Syntheticpeptide
QEPNESDLPYHEMETL

SEQ ID NO: 457 - protein, 16 aa, synthetic construct
  REGION 1..16: note = Description of Artificial Sequence: Syntheticpeptide
SRENSSSQDPQTEGTR

SEQ ID NO: 458 - protein, 16 aa, synthetic construct
  REGION 1..16: note = Description of Artificial Sequence: Syntheticpeptide
EPSGHEKEGFMEAEQC

SEQ ID NO: 459 - protein, 16 aa, synthetic construct
  REGION 1..16: note = Description of Artificial Sequence: Syntheticpeptide
KGSNYHLSDNDASDVE

SEQ ID NO: 460 - protein, 16 aa, synthetic construct
  REGION 1..16: note = Description of Artificial Sequence: Syntheticpeptide
HTQSAEPPPPPEPARI

SEQ ID NO: 461 - protein, 16 aa, synthetic construct
  REGION 1..16: note = Description of Artificial Sequence: Syntheticpeptide
CLISEERNECVIATEV

SEQ ID NO: 462 - protein, 16 aa, synthetic construct
  REGION 1..16: note = Description of Artificial Sequence: Syntheticpeptide
ASWATNLKSSIRKANK

SEQ ID NO: 463 - protein, 17 aa, synthetic construct
  REGION 1..17: note = Description of Artificial Sequence: Syntheticpeptide
TSMQPTEAMGEEPSRAE

SEQ ID NO: 464 - protein, 17 aa, synthetic construct
  REGION 1..17: note = Description of Artificial Sequence: Syntheticpeptide
LSQEHRLLRHSSMADKK

SEQ ID NO: 465 - protein, 17 aa, synthetic construct
  REGION 1..17: note = Description of Artificial Sequence: Syntheticpeptide
YSQKPPKRASSQLSWFS

SEQ ID NO: 466 - protein, 18 aa, synthetic construct
  REGION 1..18: note = Description of Artificial Sequence: Syntheticpeptide
PRRPGEPREVHIGRALGR

SEQ ID NO: 467 - protein, 18 aa, synthetic construct
  REGION 1..18: note = Description of Artificial Sequence: Syntheticpeptide
DTLSTRPGYLWVVWIYRN

SEQ ID NO: 468 - protein, 18 aa, synthetic construct
  REGION 1..18: note = Description of Artificial Sequence: Syntheticpeptide
SIMNADILNYCQKESWCK

SEQ ID NO: 469 - protein, 18 aa, synthetic construct
  REGION 1..18: note = Description of Artificial Sequence: Syntheticpeptide
NRGPPLDRAEVYSSKLQD

SEQ ID NO: 470 - protein, 19 aa, synthetic construct
  REGION 1..19: note = Description of Artificial Sequence: Syntheticpeptide
ISKLSHSKGHQKRKALKTT

SEQ ID NO: 471 - protein, 19 aa, synthetic construct
  REGION 1..19: note = Description of Artificial Sequence: Syntheticpeptide
DQNVNEAMPSLKITNDYIF

SEQ ID NO: 472 - protein, 16 aa, synthetic construct
  REGION 1..16: note = Description of Artificial Sequence: Syntheticpeptide
DNSPLRRKSIYLVIIV

SEQ ID NO: 473 - protein, 19 aa, synthetic construct
  REGION 1..19: note = Description of Artificial Sequence: Syntheticpeptide
QGQRSDVYSDLNTQRPYYK

SEQ ID NO: 474 - protein, 19 aa, synthetic construct
  REGION 1..19: note = Description of Artificial Sequence: Syntheticpeptide
EIYLEPLKDAGDGVRYLLR

SEQ ID NO: 475 - protein, 19 aa, synthetic construct
  REGION 1..19: note = Description of Artificial Sequence: Syntheticpeptide
LKHDTNIYCRMDHKAEVAS

SEQ ID NO: 476 - protein, 19 aa, synthetic construct
  REGION 1..19: note = Description of Artificial Sequence: Syntheticpeptide
QWPALKEKYPKSVYLGRIV

SEQ ID NO: 477 - protein, 20 aa, synthetic construct
  REGION 1..20: note = Description of Artificial Sequence: Syntheticpeptide
GKIFSSCFHNTILCMQKESE

SEQ ID NO: 478 - protein, 20 aa, synthetic construct
  REGION 1..20: note = Description of Artificial Sequence: Syntheticpeptide
LDDHDYGSWGNYNNPLYDDS

SEQ ID NO: 479 - protein, 20 aa, synthetic construct
  REGION 1..20: note = Description of Artificial Sequence: Syntheticpeptide
VRENHGLLPPLYKSVKTYTV

SEQ ID NO: 480 - protein, 20 aa, synthetic construct
  REGION 1..20: note = Description of Artificial Sequence: Syntheticpeptide
PCTAQECLASVLKPTNETLN

SEQ ID NO: 481 - protein, 20 aa, synthetic construct
  REGION 1..20: note = Description of Artificial Sequence: Syntheticpeptide
PNCNKPRWEKWFMVTFASST

SEQ ID NO: 482 - protein, 21 aa, synthetic construct
  REGION 1..21: note = Description of Artificial Sequence: Syntheticpeptide
GYKAFGLVGKLAASGSITMQN

SEQ ID NO: 483 - protein, 21 aa, synthetic construct
  REGION 1..21: note = Description of Artificial Sequence: Syntheticpeptide
FGRTVAIKPPKCWTGRFLMNL

SEQ ID NO: 484 - protein, 21 aa, synthetic construct
  REGION 1..21: note = Description of Artificial Sequence: Syntheticpeptide
FRRTVSSKTPKCPTGRLLMNL

SEQ ID NO: 485 - protein, 21 aa, synthetic construct
  REGION 1..21: note = Description of Artificial Sequence: Syntheticpeptide
NFHGMNPSKDTSTEYSEVRTQ

SEQ ID NO: 486 - protein, 21 aa, synthetic construct
  REGION 1..21: note = Description of Artificial Sequence: Syntheticpeptide
HNPTLQVFRKTALLGANGAQP

SEQ ID NO: 487 - protein, 21 aa, synthetic construct
  REGION 1..21: note = Description of Artificial Sequence: Syntheticpeptide
GELSLASLHIPFVETQHQTQV

SEQ ID NO: 488 - protein, 22 aa, synthetic construct
  REGION 1..22: note = Description of Artificial Sequence: Syntheticpeptide
GEEGVALPANGAGGPGGASARK

SEQ ID NO: 489 - protein, 22 aa, synthetic construct
  REGION 1..22: note = Description of Artificial Sequence: Syntheticpeptide
DRRSNQVARALHDHLGLRQGDC

SEQ ID NO: 490 - protein, 22 aa, synthetic construct
  REGION 1..22: note = Description of Artificial Sequence: Syntheticpeptide
NHRVDASSMWLYRRYYSNVCQR

SEQ ID NO: 491 - protein, 22 aa, synthetic construct
  REGION 1..22: note = Description of Artificial Sequence: Syntheticpeptide
QKMDSLDAMEGDVELEWEETTM

SEQ ID NO: 492 - protein, 23 aa, synthetic construct
  REGION 1..23: note = Description of Artificial Sequence: Syntheticpeptide
FHTLRGKGQAAEPPDFNPRDSYS

SEQ ID NO: 493 - protein, 23 aa, synthetic construct
  REGION 1..23: note = Description of Artificial Sequence: Syntheticpeptide
SVYQYGSALAHFFYSSDQAWYDR

SEQ ID NO: 494 - protein, 23 aa, synthetic construct
  REGION 1..23: note = Description of Artificial Sequence: Syntheticpeptide
DSAEAPADPFAVPEGRSQDARGY

SEQ ID NO: 495 - protein, 23 aa, synthetic construct
  REGION 1..23: note = Description of Artificial Sequence: Syntheticpeptide
SAGNGGSSLSYTNPAVAATSANL

SEQ ID NO: 496 - protein, 23 aa, synthetic construct
  REGION 1..23: note = Description of Artificial Sequence: Syntheticpeptide
KAKLQSSPDYLQVLEEQTALNKI

SEQ ID NO: 497 - protein, 24 aa, synthetic construct
  REGION 1..24: note = Description of Artificial Sequence: Syntheticpeptide
LLKGLGRRQACGYCVFWLLNPLPM

SEQ ID NO: 498 - protein, 24 aa, synthetic construct
  REGION 1..24: note = Description of Artificial Sequence: Syntheticpeptide
SRGLQGTYQDVGSLNIGDVQLEKP

SEQ ID NO: 499 - protein, 24 aa, synthetic construct
  REGION 1..24: note = Description of Artificial Sequence: Syntheticpeptide
APVVFFYLSQDSRPRSWCLRTVCN

SEQ ID NO: 500 - protein, 24 aa, synthetic construct
  REGION 1..24: note = Description of Artificial Sequence: Syntheticpeptide
HFHKVQPQEPKVTDTEYSEIKIHK

SEQ ID NO: 501 - protein, 24 aa, synthetic construct
  REGION 1..24: note = Description of Artificial Sequence: Syntheticpeptide
SISLHGLSQVSEDPPSVFNMPEAD

SEQ ID NO: 502 - protein, 24 aa, synthetic construct
  REGION 1..24: note = Description of Artificial Sequence: Syntheticpeptide
VNNCEHFVTLLRYGEGVSEQANRA

SEQ ID NO: 503 - protein, 24 aa, synthetic construct
  REGION 1..24: note = Description of Artificial Sequence: Syntheticpeptide
QNWGPRFKKLADLYGSKDTFDDDS

SEQ ID NO: 504 - protein, 25 aa, synthetic construct
  REGION 1..25: note = Description of Artificial Sequence: Syntheticpeptide
KLRSDCSRPSLQWYTRAQSKMRRPS

SEQ ID NO: 505 - protein, 25 aa, synthetic construct
  REGION 1..25: note = Description of Artificial Sequence: Syntheticpeptide
DHSRSTKAVSEKKAKGLGESRKDKK

SEQ ID NO: 506 - protein, 25 aa, synthetic construct
  REGION 1..25: note = Description of Artificial Sequence: Syntheticpeptide
STGLTWRSGTASSVSYPKQMPLSQV

SEQ ID NO: 507 - protein, 25 aa, synthetic construct
  REGION 1..25: note = Description of Artificial Sequence: Syntheticpeptide
AATVFFCLGQTTRPRSWCLRLVCNP

SEQ ID NO: 508 - protein, 26 aa, synthetic construct
  REGION 1..26: note = Description of Artificial Sequence: Syntheticpeptide
YAANPVITPEPVTSPPSYSSEIQANK

SEQ ID NO: 509 - protein, 26 aa, synthetic construct
  REGION 1..26: note = Description of Artificial Sequence: Syntheticpeptide
NHCVFTQRKITRPSQRPKTPPTDTSV

SEQ ID NO: 510 - protein, 26 aa, synthetic construct
  REGION 1..26: note = Description of Artificial Sequence: Syntheticpeptide
TQGAKEHEEAESGEGTRRRAAEAPSM

SEQ ID NO: 511 - protein, 27 aa, synthetic construct
  REGION 1..27: note = Description of Artificial Sequence: Syntheticpeptide
DHLALSRPRRLSTADPADASTIYAVVV

SEQ ID NO: 512 - protein, 27 aa, synthetic construct
  REGION 1..27: note = Description of Artificial Sequence: Syntheticpeptide
STSALSEAASDTTQEPPGSHEYAALKV

SEQ ID NO: 513 - protein, 27 aa, synthetic construct
  REGION 1..27: note = Description of Artificial Sequence: Syntheticpeptide
SFHKGEPQDLSGQEATNNEYSEIKIPK

SEQ ID NO: 514 - protein, 27 aa, synthetic construct
  REGION 1..27: note = Description of Artificial Sequence: Syntheticpeptide
EGALHRSSMQPDNSSDSDYDLHGAQRL

SEQ ID NO: 515 - protein, 27 aa, synthetic construct
  REGION 1..27: note = Description of Artificial Sequence: Syntheticpeptide
SFHKARPQYPQEQEAIGYEYSEINIPK

SEQ ID NO: 516 - protein, 27 aa, synthetic construct
  REGION 1..27: note = Description of Artificial Sequence: Syntheticpeptide
SFQMVKPWDSRGQEATDTEYSEIKIHR

SEQ ID NO: 517 - protein, 27 aa, synthetic construct
  REGION 1..27: note = Description of Artificial Sequence: Syntheticpeptide
IFPGGNKGGGTSCGPAQNPPNNQTPSS

SEQ ID NO: 518 - protein, 28 aa, synthetic construct
  REGION 1..28: note = Description of Artificial Sequence: Syntheticpeptide
ELPTATQAQNDYGPQQKSSSSRPSCSCL

SEQ ID NO: 519 - protein, 28 aa, synthetic construct
  REGION 1..28: note = Description of Artificial Sequence: Syntheticpeptide
KVPAEEPANELPMNEIEAWKAAEKKARW

SEQ ID NO: 520 - protein, 28 aa, synthetic construct
  REGION 1..28: note = Description of Artificial Sequence: Syntheticpeptide
SHQWKSSEDNSKTFSASHNVEATSMFQL

SEQ ID NO: 521 - protein, 28 aa, synthetic construct
  REGION 1..28: note = Description of Artificial Sequence: Syntheticpeptide
KEEEMADTSYGTVKAENIIMMETAQTSL

SEQ ID NO: 522 - protein, 28 aa, synthetic construct
  REGION 1..28: note = Description of Artificial Sequence: Syntheticpeptide
NLTALDWSLLSKKECLSYGGRLLGNSCK

SEQ ID NO: 523 - protein, 28 aa, synthetic construct
  REGION 1..28: note = Description of Artificial Sequence: Syntheticpeptide
SFSEMKSREPKDQEAPSTTEYSEIKTSK

SEQ ID NO: 524 - protein, 28 aa, synthetic construct
  REGION 1..28: note = Description of Artificial Sequence: Syntheticpeptide
ELIKPHRAAKGAPTSTVYAQILFEENKL

SEQ ID NO: 525 - protein, 29 aa, synthetic construct
  REGION 1..29: note = Description of Artificial Sequence: Syntheticpeptide
NHSVIGPNSRLARNVKEAPTEYASICVRS

SEQ ID NO: 526 - protein, 29 aa, synthetic construct
  REGION 1..29: note = Description of Artificial Sequence: Syntheticpeptide
DLASQPVYCNLQSLGQAPMDEEEYVIPGH

SEQ ID NO: 527 - protein, 29 aa, synthetic construct
  REGION 1..29: note = Description of Artificial Sequence: Syntheticpeptide
DYDNSENQLFLEEERRINHTAFRTVEIKR

SEQ ID NO: 528 - protein, 25 aa, synthetic construct
  REGION 1..25: note = Description of Artificial Sequence: Syntheticpeptide
DHSGGHHSDKINKSESVVYADIRKN

SEQ ID NO: 529 - protein, 33 aa, synthetic construct
  REGION 1..33: note = Description of Artificial Sequence: Syntheticpolypeptide
DHWALTQRTARAVSPQSTKPMAESITYAAVARH

SEQ ID NO: 530 - protein, 18 aa, synthetic construct
  REGION 1..18: note = Description of Artificial Sequence: Syntheticpeptide
ENLIYENVAAIQAHKLEV

SEQ ID NO: 531 - protein, 30 aa, synthetic construct
  REGION 1..30: note = Description of Artificial Sequence: Syntheticpolypeptide
SETTGLTPDQVKRNLEKYGLNELPAEEGKT

SEQ ID NO: 532 - protein, 18 aa, synthetic construct
  REGION 1..18: note = Description of Artificial Sequence: Syntheticpeptide
SLCYKFLSYFRASSTMRY

SEQ ID NO: 533 - protein, 30 aa, synthetic construct
  REGION 1..30: note = Description of Artificial Sequence: Syntheticpolypeptide
KLEKLVSSLREEDEYSIHPPSSRWKRFYRA

SEQ ID NO: 534 - protein, 26 aa, synthetic construct
  REGION 1..26: note = Description of Artificial Sequence: Syntheticpeptide
SHLRKIRTCTSIMEKDLTYSSVKRHL

SEQ ID NO: 535 - protein, 31 aa, synthetic construct
  REGION 1..31: note = Description of Artificial Sequence: Syntheticpolypeptide
ALSSSTSPRAPPSHRPLKSPQNETLYSVLKA

SEQ ID NO: 536 - protein, 32 aa, synthetic construct
  REGION 1..32: note = Description of Artificial Sequence: Syntheticpolypeptide
DPENQNFLLESNLGKKKYETEFHPGTTSFGMS

SEQ ID NO: 537 - protein, 32 aa, synthetic construct
  REGION 1..32: note = Description of Artificial Sequence: Syntheticpolypeptide
FTYGVRFLKKTPWLWNTRHCWYNYPYQPLTTD

SEQ ID NO: 538 - protein, 32 aa, synthetic construct
  REGION 1..32: note = Description of Artificial Sequence: Syntheticpolypeptide
KTLRSLEATDSAFDNPDYWHSRLFPKANAQRT

SEQ ID NO: 539 - protein, 33 aa, synthetic construct
  REGION 1..33: note = Description of Artificial Sequence: Syntheticpolypeptide
QFQNSSEMEKIPEIGKFGEKAPPAPSHVWRPAA

SEQ ID NO: 540 - protein, 33 aa, synthetic construct
  REGION 1..33: note = Description of Artificial Sequence: Syntheticpolypeptide
TFQDSAGARNNRDGNNLRKRGHPAPSPIWRHAA

SEQ ID NO: 541 - protein, 33 aa, synthetic construct
  REGION 1..33: note = Description of Artificial Sequence: Syntheticpolypeptide
LALSSGSRKASAVGDVVNLVSVDVQRLTESVLY

SEQ ID NO: 542 - protein, 33 aa, synthetic construct
  REGION 1..33: note = Description of Artificial Sequence: Syntheticpolypeptide
DILRPYFDVEPAQVRSRLLESMIPIKMVNFPQK

SEQ ID NO: 543 - protein, 33 aa, synthetic construct
  REGION 1..33: note = Description of Artificial Sequence: Syntheticpolypeptide
TCQFEGLLRPYIQHAMYDEEKGTPIFICPVSWG

SEQ ID NO: 544 - protein, 34 aa, synthetic construct
  REGION 1..34: note = Description of Artificial Sequence: Syntheticpolypeptide
LQLDKVDVIPVTAINLYPDGPEKRAENLEDKTCI

SEQ ID NO: 545 - protein, 34 aa, synthetic construct
  REGION 1..34: note = Description of Artificial Sequence: Syntheticpolypeptide
CPVFKGFSSSSKDQIAIPEDTPENTETASVCTKV

SEQ ID NO: 546 - protein, 30 aa, synthetic construct
  REGION 1..30: note = Description of Artificial Sequence: Syntheticpolypeptide
NFEAQQPTQPTSASPSLTATEIIYSEVKKQ

SEQ ID NO: 547 - protein, 31 aa, synthetic construct
  REGION 1..31: note = Description of Artificial Sequence: Syntheticpolypeptide
WSMQQPESSANIRTLLENKDSQVIYSSVKKS

SEQ ID NO: 548 - protein, 36 aa, synthetic construct
  REGION 1..36: note = Description of Artificial Sequence: Syntheticpolypeptide
GRQPGKREPLRSVLRRALGEGAELGARGQSLPMGLL

SEQ ID NO: 549 - protein, 36 aa, synthetic construct
  REGION 1..36: note = Description of Artificial Sequence: Syntheticpolypeptide
PDWLKDNDYLLHGHRPPMPSFRACFKSIFRIHTETG

SEQ ID NO: 550 - protein, 36 aa, synthetic construct
  REGION 1..36: note = Description of Artificial Sequence: Syntheticpolypeptide
DGSHIHTFLDVSFSEALYPVFRILTLEPTALTICPA

SEQ ID NO: 551 - protein, 33 aa, synthetic construct; identical to SEQ ID NO: 529
  REGION 1..33: note = Description of Artificial Sequence: Syntheticpolypeptide

SEQ ID NO: 552 - protein, 33 aa, synthetic construct
  REGION 1..33: note = Description of Artificial Sequence: Syntheticpolypeptide
HSLTLRREATEPPPSQEREPPAEPSIYAPLAIH

SEQ ID NO: 553 - protein, 38 aa, synthetic construct
  REGION 1..38: note = Description of Artificial Sequence: Syntheticpolypeptide
RFKNEFKSSGINTASSAASKERTAPHKSNTGFPKLLCA

SEQ ID NO: 554 - protein, 39 aa, synthetic construct
  REGION 1..39: note = Description of Artificial Sequence: Syntheticpolypeptide
REKMWHGRQRLGGVGAGSRPPMPAHPTPASIFSARSTDV

SEQ ID NO: 555 - protein, 39 aa, synthetic construct
  REGION 1..39: note = Description of Artificial Sequence: Syntheticpolypeptide
KKTHPDDSAGEASSRGRAHEEDDEENYENVPRVLLASDH

SEQ ID NO: 556 - protein, 40 aa, synthetic construct
  REGION 1..40: note = Description of Artificial Sequence: Syntheticpolypeptide
GSAQGRRLPLRLVLQRALGDEAELGAVRETSRRGLVDIAA

SEQ ID NO: 557 - protein, 40 aa, synthetic construct
  REGION 1..40: note = Description of Artificial Sequence: Syntheticpolypeptide
SSPTSPTSPGPQQAPPRETYLSEKIPIPDTKPGTFSLRKL

SEQ ID NO: 558 - protein, 40 aa, synthetic construct
  REGION 1..40: note = Description of Artificial Sequence: Syntheticpolypeptide
AGFPKTRLGRLATSTSRSRQLSLCDDYEEQTDEYFFDRDP

SEQ ID NO: 559 - protein, 40 aa, synthetic construct
  REGION 1..40: note = Description of Artificial Sequence: Syntheticpolypeptide
KSLMARRTYLEWPKEKSKRGLFWANLRAAINIKLTEQAKK

SEQ ID NO: 560 - protein, 41 aa, synthetic construct
  REGION 1..41: note = Description of Artificial Sequence: Syntheticpolypeptide
LPWEPSLESEEEVEEEETSEALVLNPRRHQDSSRNKAGGLP

SEQ ID NO: 561 - protein, 41 aa, synthetic construct
  REGION 1..41: note = Description of Artificial Sequence: Syntheticpolypeptide
KESDHFSTELDDITVTDTYLSATKVSFDDTCLASEVSFSQS

SEQ ID NO: 562 - protein, 41 aa, synthetic construct
  REGION 1..41: note = Description of Artificial Sequence: Syntheticpolypeptide
QNLCSRLKTSPVEGLSGNPADLEKRRQVFGHNVIPPKKPKT

SEQ ID NO: 563 - protein, 35 aa, synthetic construct
  REGION 1..35: note = Description of Artificial Sequence: Syntheticpolypeptide
NHCVFTQRKITRPSQRPKTPPTDIIVYTELPNAEP

SEQ ID NO: 564 - protein, 33 aa, synthetic construct
  REGION 1..33: note = Description of Artificial Sequence: Syntheticpolypeptide
TMKTSDKFKFVFREKMGRIVDYFTIQNPSNVDH

SEQ ID NO: 565 - protein, 43 aa, synthetic construct
  REGION 1..43: note = Description of Artificial Sequence: Syntheticpolypeptide
SENFRKAYKQVFKCHIRKDSHLSDTKESKSRIDTPPSTNCTHV

SEQ ID NO: 566 - protein, 43 aa, synthetic construct
  REGION 1..43: note = Description of Artificial Sequence: Syntheticpolypeptide
EFMNEQKLNRYPASSLVVVRSKTEDHEEAGPLPTKVNLAHSEI

SEQ ID NO: 567 - protein, 43 aa, synthetic construct
  REGION 1..43: note = Description of Artificial Sequence: Syntheticpolypeptide
GNYRLKEYEKALKYVRGLLQTEPQNNQAKELERLIDKAMKKDG

SEQ ID NO: 568 - protein, 43 aa, synthetic construct
  REGION 1..43: note = Description of Artificial Sequence: Syntheticpolypeptide
PAGEEDEEEEEDLGWGCPDVAGPTRPTAPPDLHNYMRRIKEIA

SEQ ID NO: 569 - protein, 43 aa, synthetic construct
  REGION 1..43: note = Description of Artificial Sequence: Syntheticpolypeptide
SGLREQTIAIKCLVVLVVALGLPFLAIGYWIAPCSRLGKILRS

SEQ ID NO: 570 - protein, 43 aa, synthetic construct
  REGION 1..43: note = Description of Artificial Sequence: Syntheticpolypeptide
SGLRQQTMAVKFLVVLAVAIGLPFLALIYWFAPCSKMGKIMRG

SEQ ID NO: 571 - protein, 43 aa, synthetic construct; identical to SEQ ID NO: 570
  REGION 1..43: note = Description of Artificial Sequence: Syntheticpolypeptide

SEQ ID NO: 572 - protein, 44 aa, synthetic construct
  REGION 1..44: note = Description of Artificial Sequence: Syntheticpolypeptide
PPVSRAYTTACVLTTAAVQLELITPFQLYFNPELIFKHFQIWRL

SEQ ID NO: 573 - protein, 44 aa, synthetic construct
  REGION 1..44: note = Description of Artificial Sequence: Syntheticpolypeptide
GNVLILRSVSTAVYKRFPSAQHLVQAGFMTPAEHKQLEKLSLPH

SEQ ID NO: 574 - protein, 44 aa, synthetic construct
  REGION 1..44: note = Description of Artificial Sequence: Syntheticpolypeptide
QNWWTRRKVRQEHGPERKISFPQWEKDYNLQPMNAYGLFDEYLE

SEQ ID NO: 575 - protein, 45 aa, synthetic construct
  REGION 1..45: note = Description of Artificial Sequence: Syntheticpolypeptide
DSNIAFSVNASDKGEASCCDPVSAAFEGCLRRLFTRWGSFCVRNP

SEQ ID NO: 576 - protein, 45 aa, synthetic construct
  REGION 1..45: note = Description of Artificial Sequence: Syntheticpolypeptide
QVSSAESHKDLGKKDTETVYSEVRKAVPDAVESRYSRTEGSLDGT

SEQ ID NO: 577 - protein, 45 aa, synthetic construct
  REGION 1..45: note = Description of Artificial Sequence: Syntheticpolypeptide
VLDSEPKSQASGPEPELYASVCAQTRRARASFPDQAYANSQPAAS

SEQ ID NO: 578 - protein, 46 aa, synthetic construct
  REGION 1..46: note = Description of Artificial Sequence: Syntheticpolypeptide
ETGINLRGALLAMIYNKILRLSTSNLSMGEMTLGQINNLVAIETNQ

SEQ ID NO: 579 - protein, 46 aa, synthetic construct
  REGION 1..46: note = Description of Artificial Sequence: Syntheticpolypeptide
AAGRARAKACRAPGSYGRGTHCHYKAPTVVLHMTKTDPSLENPTHL

SEQ ID NO: 580 - protein, 46 aa, synthetic construct
  REGION 1..46: note = Description of Artificial Sequence: Syntheticpolypeptide
HHELLSHKSFETNAQEDTMETHLETELDLSTITTAGRISDHKQQLA

SEQ ID NO: 581 - protein, 47 aa, synthetic construct
  REGION 1..47: note = Description of Artificial Sequence: Syntheticpolypeptide
DQKYVLILNVFPAPPKRSFLPQVLTEWYIPLEKDERHQWIVLLSFQL

SEQ ID NO: 582 - protein, 47 aa, synthetic construct
  REGION 1..47: note = Description of Artificial Sequence: Syntheticpolypeptide
LQTVYLGKNSEAQPARQILVLDNAAIVCNFGSELSLVYVPSVLEKLD

SEQ ID NO: 583 - protein, 48 aa, synthetic construct
  REGION 1..48: note = Description of Artificial Sequence: Syntheticpolypeptide
RKDSEEEVSLLGSQDIEEGNHQVEDGCREMACEEFNFGEILMTQVIHS

SEQ ID NO: 584 - protein, 47 aa, synthetic construct
  REGION 1..47: note = Description of Artificial Sequence: Syntheticpolypeptide
QRRETEVYACIENEDGSSPTAKQSPLSQERPHRFEDDGELNLVYENL

SEQ ID NO: 585 - protein, 48 aa, synthetic construct
  REGION 1..48: note = Description of Artificial Sequence: Syntheticpolypeptide
APCAKVRPYIAEGESDTDSDLCTPCGPPPRSATGEGPFGDVGWAGPRK

SEQ ID NO: 586 - protein, 49 aa, synthetic construct
  REGION 1..49: note = Description of Artificial Sequence: Syntheticpolypeptide
ERLGYSEDGLEELSRHSVSEADRLLSARSSVDFQAFGVKGGRRINEYFC

SEQ ID NO: 587 - protein, 49 aa, synthetic construct
  REGION 1..49: note = Description of Artificial Sequence: Syntheticpolypeptide
RQRLCRQSVLLWPHQPSGQRSFWAQLGMALTRDNHHFYNRNFCQGPTAE

SEQ ID NO: 588 - protein, 49 aa, synthetic construct
  REGION 1..49: note = Description of Artificial Sequence: Syntheticpolypeptide
LHRDYDRTVTLLSPPRPGRLPDLQEIGVPLYQSPPGRYLSPKKGANENV

SEQ ID NO: 589 - protein, 50 aa, synthetic construct
  REGION 1..50: note = Description of Artificial Sequence: Syntheticpolypeptide
RSPFYDRFSEARILFLLQLLADHVPGVGLVTRPLMDYLPTWQKIYFYSWG

SEQ ID NO: 590 - protein, 50 aa, synthetic construct
  REGION 1..50: note = Description of Artificial Sequence: Syntheticpolypeptide
NPSPDTRIELNDVVYLIRPDPLAYLPNSEPSRRNSICNVTGQDSREETQL

SEQ ID NO: 591 - protein, 51 aa, synthetic construct
  REGION 1..51: note = Description of Artificial Sequence: Syntheticpolypeptide
RDIYAQRMHTFITSLSSVGIVVSDPDSTDASSIEDNEDICNTTSLENCTAK

SEQ ID NO: 592 - protein, 51 aa, synthetic construct
  REGION 1..51: note = Description of Artificial Sequence: Syntheticpolypeptide
SFQGLRLWEPADQEAPSTTEYSEIKIHTGQPLRGPGFGLQLEREMSGMVPK

SEQ ID NO: 593 - protein, 51 aa, synthetic construct
  REGION 1..51: note = Description of Artificial Sequence: Syntheticpolypeptide
LVSSVADVLAQGGGPRSSQHCGEGSQLVAADHRGGLDGWEQPGAGQPPSDT

SEQ ID NO: 594 - protein, 51 aa, synthetic construct
  REGION 1..51: note = Description of Artificial Sequence: Syntheticpolypeptide
VVSDSGISTDYSSGDSQGAQGGLSDGPYSNPYENSLIPAAEPLPPSYVACS

SEQ ID NO: 595 - protein, 53 aa, synthetic construct
  REGION 1..53: note = Description of Artificial Sequence: Syntheticpolypeptide
NPPPDTRLEPSDIVYLIRSDPLAHVASSSQSRKSSCSHKLSSCNPETRDETQL

SEQ ID NO: 596 - protein, 54 aa, synthetic construct
  REGION 1..54: note = Description of Artificial Sequence: Syntheticpolypeptide
HPSCCWKPDPDQVDGARSLLSPEGYQLPQNRRMTHLAQKFFPKAKDEAASPVKG

SEQ ID NO: 597 - protein, 54 aa, synthetic construct
  REGION 1..54: note = Description of Artificial Sequence: Syntheticpolypeptide
GKKFKRYFLQLLKYIPPKAKSHSNLSTKMSTLSYRPSDNVSSSTKKPAPCFEVE

SEQ ID NO: 598 - protein, 54 aa, synthetic construct
  REGION 1..54: note = Description of Artificial Sequence: Syntheticpolypeptide
SDNFKKSFQNVLCLVKVSGTDDGERSDSKQDKSRLNETTETQRTLLNGDLQTSI

SEQ ID NO: 599 - protein, 54 aa, synthetic construct
  REGION 1..54: note = Description of Artificial Sequence: Syntheticpolypeptide
SPTNNTVYASVTHSNRETEIWTPRENDTITIYSTINHSKESKPTFSRATALDNV

SEQ ID NO: 600 - protein, 55 aa, synthetic construct
  REGION 1..55: note = Description of Artificial Sequence: Syntheticpolypeptide
LGGAAYVNTFHNIALETSDEHREFAMAATCISDTLGISLSGLLALPLHDFLCQLS

SEQ ID NO: 601 - protein, 35 aa, synthetic construct
  REGION 1..35: note = Description of Artificial Sequence: Syntheticpolypeptide
MQKDSSQETTSCYEKIFYGHLLKKFRQPNFARKLC

SEQ ID NO: 602 - protein, 56 aa, synthetic construct
  REGION 1..56: note = Description of Artificial Sequence: Syntheticpolypeptide
ALATSKALVKFDPEIIGPRDIIKIIEEIGFHASLAQRNPNAHHLDHKMEIKQWKKS

SEQ ID NO: 603 - protein, 43 aa, synthetic construct
  REGION 1..43: note = Description of Artificial Sequence: Syntheticpolypeptide
NHCVFTQRKITRPSQRPKTPPTDIIVYTELPNAESRSKVVSCP

SEQ ID NO: 604 - protein, 43 aa, synthetic construct
  REGION 1..43: note = Description of Artificial Sequence: Syntheticpolypeptide
DHCVFTQRKITRPSQRPKTPPTDTILYTELPNAKPRSKVVSCP

SEQ ID NO: 605 - protein, 58 aa, synthetic construct
  REGION 1..58: note = Description of Artificial Sequence: Syntheticpolypeptide
ERKRIQYLHAKLLKKRSKQPLGEVKRRLSLYLTKIHFWLPVLKMIRKKQMDMASADKS

SEQ ID NO: 606 - protein, 58 aa, synthetic construct
  REGION 1..58: note = Description of Artificial Sequence: Syntheticpolypeptide
SEWLESIRMKRYILHFHSAGLDTMECVLELTAEDLTQMGITLPGHQKRILCSIQGFKD

SEQ ID NO: 607 - protein, 59 aa, synthetic construct
  REGION 1..59: note = Description of Artificial Sequence: Syntheticpolypeptide
NADAKYPGYPPEHIIAEKRRARRRLLHKDGSCNVYFKHIFGEWGSYVVDIFTTLVDTKW

SEQ ID NO: 608 - protein, 60 aa, synthetic construct
  REGION 1..60: note = Description of Artificial Sequence: Syntheticpolypeptide
HRTSKRSEARSAEFTVGRKDSSIICAEVRCLQPSEVSSTEVNMRSRTLQEPLSDCEEVLC

SEQ ID NO: 609 - protein, 61 aa, synthetic construct
  REGION 1..61: note = Description of Artificial Sequence: Syntheticpolypeptide
IKYWFHTPPSIPLQIEEYLKDPTQPILEALDKDSSPKDDVWDSVSIISFPEKEQEDVLQTL

SEQ ID NO: 610 - protein, 62 aa, synthetic construct
  REGION 1..62: note = Description of Artificial Sequence: Syntheticpolypeptide
RREPRQALAGTFRDLRLRLWPQGGGWVQQVALKQVGRRWVASNPRESRPSTLLTNLDRGTPG

SEQ ID NO: 611 - protein, 62 aa, synthetic construct
  REGION 1..62: note = Description of Artificial Sequence: Syntheticpolypeptide
DFQWREKTPEPPVPCVPEQTEYATIVFPSGMGTSSPARRGSADGPRSAQPLRPEDGHCSWPL

SEQ ID NO: 612 - protein, 62 aa, synthetic construct
  REGION 1..62: note = Description of Artificial Sequence: Syntheticpolypeptide
ENDEDGAQASPEPDGGVGTRDSSRTSIRSSQWSFSTISSSTQRSYNTCCSWTQHPLIQKNRR

SEQ ID NO: 613 - protein, 62 aa, synthetic construct
  REGION 1..62: note = Description of Artificial Sequence: Syntheticpolypeptide
DEIYLESCCQARYHQKKEQMNEELKREAETLREREGEEFDNTCCAEKRKKLWDLLEKPNSSV

SEQ ID NO: 614 - protein, 64 aa, synthetic construct
  REGION 1..64: note = Description of Artificial Sequence: Syntheticpolypeptide
DMRPPPTAMITLNNSVYWQEFEDTCVYECLDGKDCQSFFCCYEECKSGSWRKGRIHIDILELDS

SEQ ID NO: 615 - protein, 64 aa, synthetic construct
  REGION 1..64: note = Description of Artificial Sequence: Syntheticpolypeptide
GTLAWMITLSDGLHNFIDGLAIGASFTVSVFQGISTSVAILCEEFPHELGDFVILLNAGMSIQQ

SEQ ID NO: 616 - protein, 64 aa, synthetic construct
  REGION 1..64: note = Description of Artificial Sequence: Syntheticpolypeptide
GHNEVIGVCRVGPDAADPHGREHWAEMLANPRKPVEHWHQLVEEKTVTSFTKGSKGLSEKENSE

SEQ ID NO: 617 - protein, 66 aa, synthetic construct
  REGION 1..66: note = Description of Artificial Sequence: Syntheticpolypeptide
PSLSTSNKNIYEVEPTVSVVQEGCGHNSSYIQNAYDLPRNSHIPGHYDLLPVRQSPANGPSQDKQS

SEQ ID NO: 618 - protein, 67 aa, synthetic construct
  REGION 1..67: note = Description of Artificial Sequence: Syntheticpolypeptide
DEARLERCCLRRLRRREEEAAEARAGPTERGAQGSPARALGPRGRLQRGRRRLRDVVDNPHSGLAGK

SEQ ID NO: 619 - protein, 68 aa, synthetic construct
  REGION 1..68: note = Description of Artificial Sequence: Syntheticpolypeptide
DELSIDSCCRDRYFRRKELSETLDFKKDTEDQESQHESEQDFSQGPCPTVRQKLWNILEKPGSSTAAR

SEQ ID NO: 620 - protein, 64 aa, synthetic construct
  REGION 1..64: note = Description of Artificial Sequence: Syntheticpolypeptide
KETKVKELKRAKTVLTVIKWKGEKSKYPQGRFWKQLQVAMPVKKSPRRSSSDEQGLSYSSLKNV

SEQ ID NO: 621 - protein, 70 aa, synthetic construct
  REGION 1..70: note = Description of Artificial Sequence: Syntheticpolypeptide
LSYNHHRLEEHEAETYEDGFTGNPSSLSQIPETNSEETTVIFEQLHSFVVDDDGFIEDKYIDIHELCEEN

SEQ ID NO: 622 - protein, 70 aa, synthetic construct
  REGION 1..70: note = Description of Artificial Sequence: Syntheticpolypeptide
DESSSSPGRQMSSSDGGPPGQSDTDSSVEESDFDTMPDIESDKNIIRTKMFLYLSDLSRKDRRIVSKKYK

SEQ ID NO: 623 - protein, 50 aa, synthetic construct
  REGION 1..50: note = Description of Artificial Sequence: Syntheticpolypeptide
RIIQEKKKHAVASDPRHLRNKGSPIIYSEVKVASTPVSGSLFLASSAPHR

SEQ ID NO: 624 - protein, 71 aa, synthetic construct
  REGION 1..71: note = Description of Artificial Sequence: Syntheticpolypeptide
AEDHLDGCCKRRYLQKIEEFAEMVEREEEDDALDSEGRDSEGPAEGEGRLGRCMRRLRDMVERPHSGLPGK

SEQ ID NO: 625 - protein, 71 aa, synthetic construct
  REGION 1..71: note = Description of Artificial Sequence: Syntheticpolypeptide
EDPWIGSESDKFILLGYLDQLRKDPALLSSEAVLPDLTDELAPVFLLRWFYSASDYISDCWDSIFHNNWRE

SEQ ID NO: 626 - protein, 72 aa, synthetic construct
  REGION 1..72: note = Description of Artificial Sequence: Syntheticpolypeptide
MDRKWYFLCNSWLSINVGDCVLDKVFPVATEQDRKQFSHLFFMKTSAGFQDGHIWYSIFSRCARSSFTRVQR

SEQ ID NO: 627 - protein, 72 aa, synthetic construct
  REGION 1..72: note = Description of Artificial Sequence: Syntheticpolypeptide
VPSDPSVEEMRKVVCEQKLRPNIPNRWQSCEALRVMAKIMRECWYANGAARLTALRIKKTLSQLSQQEGIKM

SEQ ID NO: 628 - protein, 72 aa, synthetic construct
  REGION 1..72: note = Description of Artificial Sequence: Syntheticpolypeptide
CSDFQEDIVFPFSLGWSSLVHRFLGPRNAQRVLLGLSEPIFQLPRSLASTPTAPTTPATPDNASQEELMITL

SEQ ID NO: 629 - protein, 73 aa, synthetic construct
  REGION 1..73: note = Description of Artificial Sequence: Syntheticpolypeptide
RIPLLGDEEEGSEDEGESTHLLPENENELEKFIHSVIISKRSKNIKKKLKEEQNSVTENKTKNASHNGKMEDL

SEQ ID NO: 630 - protein, 73 aa, synthetic construct
  REGION 1..73: note = Description of Artificial Sequence: Syntheticpolypeptide
SKIPQITLNFVDLKGDPFLASPTSDREIIAPKIKERTHNVTEKVTQVLSLGADVLPEYKLQAPRIHRWTILHY

SEQ ID NO: 631 - protein, 74 aa, synthetic construct
  REGION 1..74: note = Description of Artificial Sequence: Syntheticpolypeptide
DHCIFTQRKITGPSQRSKRPSTDTSVCIELPNAEPRALSPAHEHHSQALMGSSRETTALSQTQLASSNVPAAGI

SEQ ID NO: 632 - protein, 74 aa, synthetic construct
  REGION 1..74: note = Description of Artificial Sequence: Syntheticpolypeptide
PRARIMQRKRGLEWFVCDGWKFLCTSCCGWLINICRRKKELKARTVWLGCPEKCEEKHPRNSIKNQKYNVFTFI

SEQ ID NO: 633 - protein, 74 aa, synthetic construct
  REGION 1..74: note = Description of Artificial Sequence: Syntheticpolypeptide
SPRHYYSGYSSSPEYSSESTHKIWERFRPYKKHHREEVYMAAGHALRKKVQFAKDEDLHDILDYWKGVSAQQKL

SEQ ID NO: 634 - protein, 75 aa, synthetic construct
  REGION 1..75: note = Description of Artificial Sequence: Syntheticpolypeptide
SPQYHSLSYSSSPEYTCRASQSIWERFRLSRRRHKEEEEFMAAGHALRKKVQFAKDEDLHDILDYWKGVSAQHKS

SEQ ID NO: 635 - protein, 76 aa, synthetic construct
  REGION 1..76: note = Description of Artificial Sequence: Syntheticpolypeptide
MAFNAKVSDPLIGGTYMTLLNTVSNLGGNWPSTVALWLVDPLTVKECVGASNQNCRTPDAVELCKKLGGSCVTALD

SEQ ID NO: 636 - protein, 76 aa, synthetic construct
  REGION 1..76: note = Description of Artificial Sequence: Syntheticpolypeptide
YYPHGHSHSLGLDLNLGLGSGTFHSLGNALVHGGELEMGHGGTHGFGYGVGHGLSHIHGDGYGVNHGGHYGHGGGH

SEQ ID NO: 637 - protein, 49 aa, synthetic construct
  REGION 1..49: note = Description of Artificial Sequence: Syntheticpolypeptide
SFHKVKPQDPQGQEATDSEYSEIKIHKRETAETQACLRNHNPSSKEVRG

SEQ ID NO: 638 - protein, 76 aa, synthetic construct
  REGION 1..76: note = Description of Artificial Sequence: Syntheticpolypeptide
NNSTSANRNVYEVEPTVSVVQGVFSNNGRLSQDPYDLPKNSHIPCHYDLLPVRDSSSSPKQEDSGGSSSNSSSSSE

SEQ ID NO: 639 - protein, 77 aa, synthetic construct
  REGION 1..77: note = Description of Artificial Sequence: Syntheticpolypeptide
RREFRKALKSLLWRIASPSITSMRPFTATTKPEHEDQGLQAPAPPHAAAEPDLLYYPPGVVVYSGGRYDLLPSSSAY

SEQ ID NO: 640 - protein, 77 aa, synthetic construct
  REGION 1..77: note = Description of Artificial Sequence: Syntheticpolypeptide
NELFIDSCCSNRYQERKEENHEKDWDQKSHDVSTDSSFEESSLFEKELEKFDTLRFGQLRKKIWIRMENPAYCLSAK

SEQ ID NO: 641 - protein, 77 aa, synthetic construct
  REGION 1..77: note = Description of Artificial Sequence: Syntheticpolypeptide
NEFFIDSCCSYSYHGRKVEPEQEKWDEQSDQESTTSSFDEILAFYNDASKFDGQPLGNFRRQLWLALDNPGYSVLSR

SEQ ID NO: 642 - protein, 78 aa, synthetic construct
  REGION 1..78: note = Description of Artificial Sequence: Syntheticpolypeptide
DATDQESLELKPTSRAGIKQKGLLLSSSLMHSESELDSDDAIFTWPDREKGKLLHGQNGSVPNGQTPLKARSPREEIL

SEQ ID NO: 643 - protein, 78 aa, synthetic construct
  REGION 1..78: note = Description of Artificial Sequence: Syntheticpolypeptide
SRGASIPGTPPTAGRVVSLSPEDAPGPSLRRSGGCSPSSDTVFGPGAPAAAGAEACRRENRGTLYGTRSFTVSVAQKR

SEQ ID NO: 644 - protein, 79 aa, synthetic construct
  REGION 1..79: note = Description of Artificial Sequence: Syntheticpolypeptide
NKTFSPAQRHGNSGITMMRKKAKFSLRENPVEETKGEAFSDGNIEVKLCEQTEEKKKLKRHLALFRSELAENSPLDSGH

SEQ ID NO: 645 - protein, 79 aa, synthetic construct
  REGION 1..79: note = Description of Artificial Sequence: Syntheticpolypeptide
YESHRAGCEKYEGPYPQHPFYSSASGDVIGGLSREEIRQMYESSELSREEIQERMRVLELYANDPEFAAFVREQQVEEV

SEQ ID NO: 646 - protein, 79 aa, synthetic construct
  REGION 1..79: note = Description of Artificial Sequence: Syntheticpolypeptide
FKNSDKEDDQEHPSEKQPSGAESGTLARASLALPTSSLSRTASQSSSHRGWEILRQNTLGHLNLGLNLSEGDGEEVYHF

SEQ ID NO: 647 - protein, 79 aa, synthetic construct
  REGION 1..79: note = Description of Artificial Sequence: Syntheticpolypeptide
QDLKGDDTAVRDAHSKRDTKCQPQGSSGEEKGTPTTLRGGEASERKRPDSGCSTSKDTKYQSVYVISEEKDECVIATEV

SEQ ID NO: 648 - protein, 54 aa, synthetic construct
  REGION 1..54: note = Description of Artificial Sequence: Syntheticpolypeptide
DHCVFIQRKISRPSQRPKTPLTDTSVYTELPNAEPRSKVVSCPRAPQSGLEGVF

SEQ ID NO: 649 - protein, 79 aa, synthetic construct
  REGION 1..79: note = Description of Artificial Sequence: Syntheticpolypeptide
RDLPPLSSSEMEEFLTQESKKHENEFNEEVALTEIYKYIVKYFDEILNKLERERGLEEAQKQLLHVKVLFDEKKKCKWM

SEQ ID NO: 650 - protein, 81 aa, synthetic construct
  REGION 1..81: note = Description of Artificial Sequence: Syntheticpolypeptide
LGSPTSPGPGHYLRCDSTQPLLAGLTPSPKSYENLWFQASPLGTLVTPAPSQEDDCVFGPLLNFPLLQGIRVHGMEALGSF

SEQ ID NO: 651 - protein, 81 aa, synthetic construct
  REGION 1..81: note = Description of Artificial Sequence: Syntheticpolypeptide
LSQPGPTLPKTHVKTASLGLAGKARSPLLPVSVPTAPEVSEESHKPTEDSANVYEQDDLSEQMASLEGLMKQLNAITGSAF

SEQ ID NO: 652 - protein, 70 aa, synthetic construct
  REGION 1..70: note = Description of Artificial Sequence: Syntheticpolypeptide
ATECGQGEEKSEGPLGSQESESCGLRKEEKEPHADKDFCQEKQVAYCPSGKPEGLNYACLTHSGYGDGSD

SEQ ID NO: 653 - protein, 82 aa, synthetic construct
  REGION 1..82: note = Description of Artificial Sequence: Syntheticpolypeptide
KELILAVDGVLSVHSLHIWSLTMNQVILSAHVATAASRDSQVVRREIAKALSKSFTMHSLTIQMESPVDQDPDCLFCEDPCD

SEQ ID NO: 654 - protein, 82 aa, synthetic construct
  REGION 1..82: note = Description of Artificial Sequence: Syntheticpolypeptide
TSFPRLPEDEPAPAAPLRGRKDEDAFLGDPDTDPDSFLKSARLQRLPSSSSEMGSQDGSPLRETRKDPFSAAAAECSCRQDG

SEQ ID NO: 655 - protein, 82 aa, synthetic construct
  REGION 1..82: note = Description of Artificial Sequence: Syntheticpolypeptide
LEKERELQQLGITEYLRKNIAQLQPDMEAHYPGAHEELKLMETLMYSRPRKVLVEQTKNEYFELKANLHAEPDYLEVLEQQT

SEQ ID NO: 656 - protein, 83 aa, synthetic construct
  REGION 1..83: note = Description of Artificial Sequence: Syntheticpolypeptide
KNSLKEANHDGDFGITLAELRALMELRSTDALRKIQESYGDVYGICTKLKTSPNEGLSGNPADLERREAVFGKNFIPPKKPKT

SEQ ID NO: 657 - protein, 83 aa, synthetic construct
  REGION 1..83: note = Description of Artificial Sequence: Syntheticpolypeptide
YNCLDFPAGVVPVTTVTAEDEAQMEHYRGYFGDIWDKMLQKGMKKSVGLPVAVQCVALPWQEELCLRFMREVERLMTPEKQSS

SEQ ID NO: 658 - protein, 84 aa, synthetic construct
  REGION 1..84: note = Description of Artificial Sequence: Syntheticpolypeptide
PAFDLLSRKMLGCPINDLNVILLFLRANISELISFSWLSVLCVLKDTTTQKHNIDTVVDFMTLLAGLEPSKPKHLTNSACDEHP

SEQ ID NO: 659 - protein, 85 aa, synthetic construct
  REGION 1..85: note = Description of Artificial Sequence: Syntheticpolypeptide
SRRFQAAFQNVISSFHKQWHSQHDPQLPPAQRNIFLTECHFVELTEDIGPQFPCQSSMHNSHLPAALSSEQMSRTNYQSFHFNKT

SEQ ID NO: 660 - protein, 80 aa, synthetic construct
  REGION 1..80: note = Description of Artificial Sequence: Syntheticpolypeptide
ELKTTRFHPNRQSSMYTVTRMESMTVVFDPNDADTTRSSRKKRATPRDPSFNGCSRRNSKSASATSSFISSPYTSVDEYS

SEQ ID NO: 661 - protein, 85 aa, synthetic construct
  REGION 1..85: note = Description of Artificial Sequence: Syntheticpolypeptide
SRQCKQFAKDLLDQTRSSRELEIILNYRDDNSLIEEQSGNDLARLKLAIKYRQKEFVAQPNCQQLLASRWYDEFPGWRRRHWAVK

SEQ ID NO: 662 - protein, 86 aa, synthetic construct
  REGION 1..86: note = Description of Artificial Sequence: Syntheticpolypeptide
VRKKQKAQHRCMRRVGRTGSRRSGYAFSHQEGFGELIMSGKNMRLSSLALSSFTTRSSSSWIESLRRKKSDSASSPSGGADKPLKG

SEQ ID NO: 663 - protein, 86 aa, synthetic construct
  REGION 1..86: note = Description of Artificial Sequence: Syntheticpolypeptide
LLKLMFVNPPELPEQTTKALPVRFLFTDYNRLSSVGGETSLAEMIATLSDACEREFGFLATRLFRVFKTEDTQGKKKWKKTCCLPS

SEQ ID NO: 664 - protein, 86 aa, synthetic construct
  REGION 1..86: note = Description of Artificial Sequence: Syntheticpolypeptide
PPYLGKLDVSFQRACQCEGKDNRIPLLKEVFEAFPNTPINIDIKVNNNVLIKKVSELVKRYNREHLTVWGNANYEIVEKCYKENSD

SEQ ID NO: 665 - protein, 86 aa, synthetic construct
  REGION 1..86: note = Description of Artificial Sequence: Syntheticpolypeptide
VVAAMQARHAHVPQLRWETMDVRKLDFPSASFDVVLEKGTLDALLAGERDPWTVSSEGVHTVDQVLSEVGFQKGTRQLLGSRTQLE

SEQ ID NO: 666 - protein, 86 aa, synthetic construct
  REGION 1..86: note = Description of Artificial Sequence: Syntheticpolypeptide
SAEVQAVLRKFDELDAVMSRLPHHSESRQEHERISRIHEEFKKKKNDPTFLEKKERCDYLKNKLSHIKQRIQEYDKVMNWDVQGYS

SEQ ID NO: 667 - protein, 86 aa, synthetic construct
  REGION 1..86: note = Description of Artificial Sequence: Syntheticpolypeptide
AERVKELPSAGLVHYNFCTLPKRQFAPSYESRRQNQDRINKTVLYGTPRKCFVGQSKPNHPLLQAKPQSEPDYLEVLEKQTAISQL

SEQ ID NO: 668 - protein, 59 aa, synthetic construct
  REGION 1..59: note = Description of Artificial Sequence: Syntheticpolypeptide
NLPPNPKRQQRKPKGNKNSILATEQEITYAELNLQKASQDFQGNDKTYHCKDLPSAPEK

SEQ ID NO: 669 - protein, 88 aa, synthetic construct
  REGION 1..88: note = Description of Artificial Sequence: Syntheticpolypeptide
EKPESRTSIHNFMAHPEFRIEDSQPHIPLIDDTDLEEDAALKQNSSPPSSLNKNNSAIDSGINLTTDTSKSATSSSPGSPIHSLETSL

SEQ ID NO: 670 - protein, 88 aa, synthetic construct
  REGION 1..88: note = Description of Artificial Sequence: Syntheticpolypeptide
EKPESRSSIHNFMTHPEFRIEDSEPHIPLIDDTDAEDDAPTKRNSSPPPSPNKNNNAVDSGIHLTIEMNKSATSSSPGSPLHSLETSL

SEQ ID NO: 671 - protein, 88 aa, synthetic construct
  REGION 1..88: note = Description of Artificial Sequence: Syntheticpolypeptide
QGDPQRSPSSCNDLYATVKDFEKTPNSTLPPAGRPSEEPEPDYEAIQTLNREEEKATLGTNGHHGLVPKENDYESISDLQQGRDITRL

SEQ ID NO: 672 - protein, 89 aa, synthetic construct
  REGION 1..89: note = Description of Artificial Sequence: Syntheticpolypeptide
KVAMIEPGYFKTAVTSKERFLKSFLEIWDRSSPEVKEAYGEKFVADYKKSAEQMEQKCTQDLSLVTNCMEHALIACHPRTRYSAGWDAK

SEQ ID NO: 673 - protein, 91 aa, synthetic construct
  REGION 1..91: note = Description of Artificial Sequence: Syntheticpolypeptide
EKPESKTSIHNFMATPEFLINDYTHNIPLIDDTDVDENEERLRAPPPPSPNQNNNAIDSGIYLTTHVTKSATSSVFSSSPGSPLHSVETSL

SEQ ID NO: 674 - protein, 91 aa, synthetic construct
  REGION 1..91: note = Description of Artificial Sequence: Syntheticpolypeptide
PAAPLAGPALPARRLSRASRPLSASQPSLPHGAPGPAASTRPASSSTPRLGPTPAARAAAPSPDRRDSASPGAAGGLDPQDSARSRLSSNL

SEQ ID NO: 675 - protein, 92 aa, synthetic construct
  REGION 1..92: note = Description of Artificial Sequence: Syntheticpolypeptide
SKHFRKGFRTICAGLLGRAPGRASGRVCAAARGTHSGSVLERESSDLLHMSEAAGALRPCPGASQPCILEPCPGPSWQGPKAGDSILTVDVA

SEQ ID NO: 676 - protein, 92 aa, synthetic construct
  REGION 1..92: note = Description of Artificial Sequence: Syntheticpolypeptide
SNAKIAYKQNKANTAQEQQYGSHEENLPADLEALQREIRMAQERLDLAVQAYSHQNNPHGPREKKAKVGSKAGSNKSTASSKSGDGKTSVWI

SEQ ID NO: 677 - protein, 94 aa, synthetic construct
  REGION 1..94: note = Description of Artificial Sequence: Syntheticpolypeptide
QNEEESGEPEQAAGDAPPPYSSISAESAAYFDYKDESGFPKPPSYNVATTLPSYDEAERTKAEATIPLVPGRDEDFVGRDDFDDADQLRIGNDG

SEQ ID NO: 678 - protein, 94 aa, synthetic construct
  REGION 1..94: note = Description of Artificial Sequence: Syntheticpolypeptide
EGDPQTQLQDDKDPMLILRGRVPEGRALDSEVDPDPEGDLGVRGPVFGEPSAPPHTSGVSLGESRSSEVDVSDLGSRNYSARTDFYCLVSKDDM

SEQ ID NO: 679 - protein, 95 aa, synthetic construct
  REGION 1..95: note = Description of Artificial Sequence: Syntheticpolypeptide
LLGDFLRACFVRFMNYCWCWDLEAGFPSYAEFDISGNVLGLIFNQGMIWMGSFYAPGLVGINVLRLLTSMYFQCWAVMSSNVPHERVFKASRSNN

SEQ ID NO: 680 - protein, 96 aa, synthetic construct
  REGION 1..96: note = Description of Artificial Sequence: Syntheticpolypeptide
TIEPVQQAGCSATRLPGDGQTSAGDASLQDPPSYPPVQVIRARVSSGSSSEVSSINSDLEWDPEDVNLEGSKENVELLGSQVHQDSVRTAHLSDDD

SEQ ID NO: 681 - protein, 96 aa, synthetic construct
  REGION 1..96: note = Description of Artificial Sequence: Syntheticpolypeptide
RRTLKQAFADCTVILCEHRIEAMLECQQFLVIEENKVRQYDSIQKLLNERSLFRQAISPSDRVKLFPHRNSSKCKSKPQIAALKEETEEEVQDTRL

SEQ ID NO: 682 - protein, 99 aa, synthetic construct
  REGION 1..99: note = Description of Artificial Sequence: Syntheticpolypeptide
VKAFHSSLHESIQKPYNQKSIHSFMTHPEFAIEEELPRTPLLDEEEEENPDKASKFGTRVLLLDGEVTPYANTNNNAVDCNQVQLPQSDSSLQSLETSV

SEQ ID NO: 683 - protein, 72 aa, synthetic construct
  REGION 1..72: note = Description of Artificial Sequence: Syntheticpolypeptide
NLPKGKKPAPQAAEPNNHTEYASIQTSPQPASEDTLTYADLDMVHLNRTPKQPAPKPEPSFSEYASVQVPRK

SEQ ID NO: 684 - protein, 82 aa, synthetic construct
  REGION 1..82: note = Description of Artificial Sequence: Syntheticpolypeptide
TLQLAGTSPQKATTKLSSAQVDQVEVEYVTMASLPKEDISYASLTLGAEDQEPTYCNMGHLSSHLPGRGPEEPTEYSTISRP

SEQ ID NO: 685 - protein, 311 aa, synthetic construct
  REGION 1..311: note = Description of Artificial Sequence: Syntheticpolypeptide
ETGPKHIPLQTLLKFMVDIALGMEYLSNRNFLHRDLAARNCMLRDDMTVCVADFGLSKKIYSGDYYRQGRIAKMPVKWIAIESLADRVYTSKSDVWAFGVTMWEIATRGMTPYPGVQNHEMYDYLLHGHRLKQPEDCLDELYEIMYSCWRTDPLDRPTFSVLRLQLEKLLESLPDVRNQADVIYVNTQLLESSEGLAQGSTLAPLDLNIDPDSIIASCTPRAAISVVTAEVHDSKPHEGRYILNGGSEEWEDLTSAPSAAVTAEKNSVLPGERLVRNGVSWSHSSMLPLGSSLPDELLFADDSSEGSEVLM

SEQ ID NO: 686 - protein, 7 aa, synthetic construct
  REGION 1..7: note = Description of Artificial Sequence: Syntheticpeptide
KEEEMAD

SEQ ID NO: 687 - protein, 12 aa, synthetic construct
  REGION 1..12: note = Description of Artificial Sequence: Syntheticpeptide
NFHGMNPSKDTS

SEQ ID NO: 688 - protein, 14 aa, synthetic construct
  REGION 1..14: note = Description of Artificial Sequence: Syntheticpeptide
HFHKVQPQEPKVTD

SEQ ID NO: 689 - protein, 15 aa, synthetic construct
  REGION 1..15: note = Description of Artificial Sequence: Syntheticpeptide
ELIKPHRAAKGAPTS

SEQ ID NO: 690 - protein, 17 aa, synthetic construct
  REGION 1..17: note = Description of Artificial Sequence: Syntheticpeptide
SFQMVKPWDSRGQEATD

SEQ ID NO: 691 - protein, 17 aa, synthetic construct
  REGION 1..17: note = Description of Artificial Sequence: Syntheticpeptide
QVSSAESHKDLGKKDTE

SEQ ID NO: 692 - protein, 18 aa, synthetic construct
  REGION 1..18: note = Description of Artificial Sequence: Syntheticpeptide
SFSEMKSREPKDQEAPST

SEQ ID NO: 693 - protein, 18 aa, synthetic construct
  REGION 1..18: note = Description of Artificial Sequence: Syntheticpeptide
SFQGLRLWEPADQEAPST

SEQ ID NO: 694 - protein, 18 aa, synthetic construct
  REGION 1..18: note = Description of Artificial Sequence: Syntheticpeptide
NLPKGKKPAPQAAEPNNH

SEQ ID NO: 695 - protein, 19 aa, synthetic construct
  REGION 1..19: note = Description of Artificial Sequence: Syntheticpeptide
NHSVIGPNSRLARNVKEAP

SEQ ID NO: 696 - protein, 19 aa, synthetic construct
  REGION 1..19: note = Description of Artificial Sequence: Syntheticpeptide
DFQWREKTPEPPVPCVPEQ

SEQ ID NO: 697 - protein, 20 aa, synthetic construct
  REGION 1..20: note = Description of Artificial Sequence: Syntheticpeptide
DHLALSRPRRLSTADPADAS

SEQ ID NO: 698 - protein, 29 aa, synthetic construct
  REGION 1..29: note = Description of Artificial Sequence: Syntheticpeptide
SPTNNTVYASVTHSNRETEIWTPRENDTI

SEQ ID NO: 699 - protein, 42 aa, synthetic construct
  REGION 1..42: note = Description of Artificial Sequence: Syntheticpolypeptide
DGLRDRRSFHGPYTVQAGLPLNPMGRTGLRGRGSLSCFGPNH

SEQ ID NO: 700 - protein, 55 aa, synthetic construct
  REGION 1..55: note = Description of Artificial Sequence: Syntheticpolypeptide
MRIKMCLIKLCKSKAKSCENDLEMGMLNSKFKKTRYQAGMRNSENLTANNTLSKP

SEQ ID NO: 701 - protein, 57 aa, synthetic construct
  REGION 1..57: note = Description of Artificial Sequence: Syntheticpolypeptide
QDLKGDDTAVRDAHSKRDTKCQPQGSSGEEKGTPTTLRGGEASERKRPDSGCSTSKD

SEQ ID NO: 702 - protein, 69 aa, synthetic construct
  REGION 1..69: note = Description of Artificial Sequence: Syntheticpolypeptide
KQQMEKGPIDAITGEARYSLSEDKLIRQQIDYKTLTLHCVCPENEGSAQVPVKVLNCDSITQAKDKLLD

SEQ ID NO: 703 - protein, 73 aa, synthetic construct
  REGION 1..73: note = Description of Artificial Sequence: Syntheticpolypeptide
TLQLAGTSPQKATTKLSSAQVDQVEVEYVTMASLPKEDISYASLTLGAEDQEPTYCNMGHLSSHLPGRGPEEP

SEQ ID NO: 704 - protein, 95 aa, synthetic construct
  REGION 1..95: note = Description of Artificial Sequence: Syntheticpolypeptide
EDDSDVEWKFARSKLWLSYFDDGKTLPPPFSLVPSPKSFVYFIMRIVNFPKCRRRRLQKDIEMGMGNSKSRLNLFTQSNSRVFESHSFNSILNQP

SEQ ID NO: 705 - protein, 100 aa, synthetic construct
  REGION 1..100: note = Description of Artificial Sequence: Syntheticpolypeptide
RKVPSFTFTPTVTYQRGGEAVSSGGRPGLLNISEPAAQPWLADTWPNTGNNHNDCSISCCTAGNGNSDSNLTTYSRPADCIANYNNQLDNKQTNLMLPES

SEQ ID NO: 706 - protein, 110 aa, synthetic construct
  REGION 1..110: note = Description of Artificial Sequence: Syntheticpolypeptide
GDQPVYLPTQMLVKFMADIASGMEYLSTKRFIHRDLAARNCMLNENMSVCVADFGLSKKIYNGDYYRQGRIAKMPVKWIAIESLADRVYTSKSDVWSFGVTMWEIATRGQ

SEQ ID NO: 707 - protein, 110 aa, synthetic construct
  REGION 1..110: note = Description of Artificial Sequence: Syntheticpolypeptide
ETGPKHIPLQTLLKFMVDIALGMEYLSNRNFLHRDLAARNCMLRDDMTVCVADFGLSKKIYSGDYYRQGRIAKMPVKWIAIESLADRVYTSKSDVWAFGVTMWEIATRGM

SEQ ID NO: 708 - protein, 113 aa, synthetic construct
  REGION 1..113: note = Description of Artificial Sequence: Syntheticpolypeptide
FEFCDLGDLKAYLRSEQEHMRGDSQTMLLQRMACEVAAGLAAMHKLHFLHSDLALRNCFLTSDLNVKVGDYGIGFSRYKEDYIETDDKKVFPLRWTAPELVTSFQDRLLTADQ

SEQ ID NO: 709 - protein, 142 aa, synthetic construct
  REGION 1..142: note = Description of Artificial Sequence: Syntheticpolypeptide
LEAPVGREARKWLQLAVFCSPLVPGQSHLQLRIYFLNNTPCALQWALTNEQPHGGRLRGPCQLFDFNGARGDQCLKLTYISEGWENVDDSSCQLVPHLHIWHGKCPFRSFCFRRKAADENEDCSALTNEIIVTMHTFQDGLE

SEQ ID NO: 710 - protein, 146 aa, synthetic construct
  REGION 1..146: note = Description of Artificial Sequence: Syntheticpolypeptide
QRSLYDRPASYKKKSMLDSEVKNLLSDDNSEGLTLLDLLSFTYQVARGMEFLASKNCVHRDLAARNVLLAQGKIVKICDFGLARDIMHDSNYVSKGSTFLPVKWMAPESIFDNLYTTLSDVWSYGILLWEIFSLGGTPYPGMMVDS

SEQ ID NO: 711 - protein, 152 aa, synthetic construct
  REGION 1..152: note = Description of Artificial Sequence: Syntheticpolypeptide
KECAGEPLFSLFCAIKQQMEKGPIDAITGEARYSLSEDKLIRQQIDYKTLVLSCVSPDNANSPEVPVKILNCDTITQVKEKILDAIFKNVPCSHRPKAADMDLEWRQGSGARMILQDEDITTKIENDWKRLNTLAHYQVPDGSVVALVSKQV

SEQ ID NO: 712 - protein, 204 aa, synthetic construct
  REGION 1..204: note = Description of Artificial Sequence: Syntheticpolypeptide
TVTESYTTSDTLKPSVHVHDNRPASNVVVTERVVGPISGADLHGMLEMPDLRDGSNVIVTERVIAPSSSLPTSLTIHHPRESSNVVVTERVIQPTSGMIGSLSMHPELANAHNVIVTERVVSGAGVTGISGTTGISGGIGSSGLVGTSMGAGSGALSGAGISGGGIGLSSLGGTASIGHMRSSSDHHFNQTIGSASPSTARSRI

SEQ ID NO: 713 - protein, 213 aa, synthetic construct
  REGION 1..213: note = Description of Artificial Sequence: Syntheticpolypeptide
NPEYFSAADVYVPDEWEVAREKITMSRELGQGSFGMVYEGVAKGVVKDEPETRVAIKTVNEAASMRERIEFLNEASVMKEFNCHHVVRLLGVVSQGQPTLVIMELMTRGDLKSYLRSLRPEMENNPVLAPPSLSKMIQMAGEIADGMAYLNANKFVHRDLAARNCMVAEDFTVKIGDFGMTRDIYETDYYRKGGKGLLPVRWMSPESLKDGVF

SEQ ID NO: 714 - protein, 351 aa, synthetic construct
  REGION 1..351: note = Description of Artificial Sequence: Syntheticpolypeptide
GGAYVGPTQNRILRLSKELGIETYKVNVSERLVQYVKGKTYPFRGAFPPVWNPIAYLDYNNLWRTIDNMGKEIPTDAPWEAQHADKWDKMTMKELIDKICWTKTARRFAYLFVNINVTSEPHEVSALWFLWYVKQCGGTTRIFSVTNGGQERKFVGGSGQVSERIMDLLGDQVKLNHPVTHVDQSSDNIIIETLNHEHYECKYVINAIPPTLTAKIHFRPELPAERNQLIQRLPMGAVIKCMMYYKEAFWKKKDYCGCMIIEDEDAPISITLDDTKPDGSLPAIMGFILARKADRLAKLHKEIRKKKICELYAKVLGSQEALHPVHYEEKNWCEEQYSGGCYTAYFPPGIM

SEQ ID NO: 715 - protein, 351 aa, synthetic construct
  REGION 1..351: note = Description of Artificial Sequence: Syntheticpolypeptide
GGSYVGPTQNRILRLAKELGLETYKVNEVERLIHHVKGKSYPFRGPFPPVWNPITYLDHNNFWRTMDDMGREIPSDAPWKAPLAEEWDNMTMKELLDKLCWTESAKQLATLFVNLCVTAETHEVSALWFLWYVKQCGGTTRIISTTNGGQERKFVGGSGQVSERIMDLLGDRVKLERPVIYIDQTRENVLVETLNHEMYEAKYVISAIPPTLGMKIHFNPPLPMMRNQMITRVPLGSVIKCIVYYKEPFWRKKDYCGTMIIDGEEAPVAYTLDDTKPEGNYAAIMGFILAHKARKLARLTKEERLKKLCELYAKVLGSLEALEPVHYEEKNWCEEQYSGGCYTTYFPPGIL

SEQ ID NO: 716 - protein, 755 aa, synthetic construct
  REGION 1..755: note = Description of Artificial Sequence: Syntheticpolypeptide
KGKKFIVVCGNITVDSVTAFLRNFLRDKSGEINTEIVFLGETPPSLELETIFKCYLAYTTFISGSAMKWEDLRRVAVESAEACLIIANPLCSDSHAEDISNIMRVLSIKNYDSTTRIIIQILQSHNKVYLPKIPSWNWDTGDNIICFAELKLGFIAQGCLVPGLCTFLTSLFVEQNKKVMPKQTWKKHFLNSMKNKILTQRLSDDFAGMSFPEVARLCFLKMHLLLIAIEYKSLFTDGFCGLILNPPPQVRIRKNTLGFFIAETPKDVRRALFYCSVCHDDVFIPELITNCGCKSRSRQHITVPSVKRMKKCLKGISSRISGQDSPPRVSASTSSISNFTTRTLQHDVEQDSDQLDSSGMFHWCKPTSLDKVTLKRTGKSKYKFRNHIVACVFGDAHSAPMGLRNFVMPLRASNYTRKELKDIVFIGSLDYLQREWRFLWNFPQIYILPGCALYSGDLHAANIEQCSMCAVLSPPPQPSSNQTLVDTEAIMATLTIGSLQIDSSSDPSPSVSEETPGYTNGHNEKSNCRKVPILTELKNPSNIHFIEQLGGLEGSLQETNLHLSTAFSTGTVFSGSFLDSLLATAFYNYHVLELLQMLVTGGVSSQLEQHLDKDKVYGVADSCTSLLSGRNRCKLGLLSLHETILSDVNPRNTFGQLFCGSLDLFGILCVGLYRIIDEEELNPENKRFVITRPANEFKLLPSDLVFCAIPFSTACYKRNEEFSLQKSYEIVNKASQTTETHSDTNCPPTIDSVTE

SEQ ID NO: 717 - protein, 905 aa, synthetic construct
  REGION 1..905: note = Description of Artificial Sequence: Syntheticpolypeptide
ASLIRGNRSNCALFSTNLDWLVSKLDRLEASSGILEVLYCVLIESPEVLNIIQENHIKSIISLLDKHGRNHKVLDVLCSLCVCNGVAVRSNQDLITENLLPGRELLLQTNLINYVTSIRPNIFVGRAEGTTQYSKWYFEVMVDEVTPFLTAQATHLRVGWALTEGYTPYPGAGEGWGGNGVGDDLYSYGFDGLHLWTGHVARPVTSPGQHLLAPEDVISCCLDLSVPSISFRINGCPVQGVFESFNLDGLFFPVVSFSAGVKVRFLLGGRHGEFKFLPPPGYAPCHEAVLPRERLHLEPIKEYRREGPRGPHLVGPSRCLSHTDFVPCPVDTVQIVLPPHLERIREKLAENIHELWALTRIEQGWTYGPVRDDNKRLHPCLVDFHSLPEPERNYNLQMSGETLKTLLALGCHVGMADEKAEDNLKKTKLPKTYMMSNGYKPAPLDLSHVRLTPAQTTLVDRLAENGHNVWARDRVGQGWSYSAVQDIPARRNPRLVPYRLLDEATKRSNRDSLCQAVRTLLGYGYNIEPPDQEPSQVENQSRCDRVRIFRAEKSYTVQSGRWYFEFEAVTTGEMRVGWARPELRPDVELGADELAYVFNGHRGQRWHLGSEPFGRPWQPGDVVGCMIDLTENTIIFTLNGEVLMSDSGSETAFREIEIGDGFLPVCSLGPGQVGHLNLGQDVSSLRFFAICGLQEGFEPFAINMQRPVTTWFSKGLPQFEPVPLEHPHYEVSRVDGTVDTPPCLRLTHRTWGSQNSLVEMLFLRLSLPVQFHQHFRCTAGATPLAPPGLQPPAEDEARAAEPDPDYENLRRSAGGWSEAENGKEGTAKEGAPGGTPQAGGEAQPARAENEKDATTEKNKKRGFLFKAKKVAMMTQPPATPTLPRLPHDVVPADNRDDPEIILNTT

SEQ ID NO: 718 - protein, 5 aa, synthetic construct
  REGION 1..5: note = Description of Artificial Sequence: Syntheticpeptide
NLMSY

SEQ ID NO: 719 - protein, 6 aa, synthetic construct
  REGION 1..6: note = Description of Artificial Sequence: Syntheticpeptide
SRFKRQ

SEQ ID NO: 720 - protein, 7 aa, synthetic construct
  REGION 1..7: note = Description of Artificial Sequence: Syntheticpeptide
MDDSDTP

SEQ ID NO: 721 - protein, 7 aa, synthetic construct
  REGION 1..7: note = Description of Artificial Sequence: Syntheticpeptide
YGKKRNR

SEQ ID NO: 722 - protein, 7 aa, synthetic construct
  REGION 1..7: note = Description of Artificial Sequence: Syntheticpeptide
KSQWIKE

SEQ ID NO: 723 - protein, 8 aa, synthetic construct
  REGION 1..8: note = Description of Artificial Sequence: Syntheticpeptide
CRGLAPEE

SEQ ID NO: 724 - protein, 8 aa, synthetic construct
  REGION 1..8: note = Description of Artificial Sequence: Syntheticpeptide
RLCSAMKQ

SEQ ID NO: 725 - protein, 9 aa, synthetic construct
  REGION 1..9: note = Description of Artificial Sequence: Syntheticpeptide
YRKREWIKE

SEQ ID NO: 726 - protein, 11 aa, synthetic construct
  REGION 1..11: note = Description of Artificial Sequence: Syntheticpeptide
RKMKRSSSEIK

SEQ ID NO: 727 - protein, 13 aa, synthetic construct
  REGION 1..13: note = Description of Artificial Sequence: Syntheticpeptide
FCNMRRPAHADIK

SEQ ID NO: 728 - protein, 13 aa, synthetic construct
  REGION 1..13: note = Description of Artificial Sequence: Syntheticpeptide
LRTVKRANGGELK

SEQ ID NO: 729 - protein, 14 aa, synthetic construct
  REGION 1..14: note = Description of Artificial Sequence: Syntheticpeptide
MEQHVGIDVLKRDP

SEQ ID NO: 730 - protein, 14 aa, synthetic construct
  REGION 1..14: note = Description of Artificial Sequence: Syntheticpeptide
LEQHVDPHVLQNKP

SEQ ID NO: 731 - protein, 14 aa, synthetic construct
  REGION 1..14: note = Description of Artificial Sequence: Syntheticpeptide
RNKDVKDAIRKIIN

SEQ ID NO: 732 - protein, 15 aa, synthetic construct
  REGION 1..15: note = Description of Artificial Sequence: Syntheticpeptide
VDFRPPPQGPSGPEV

SEQ ID NO: 733 - protein, 16 aa, synthetic construct
  REGION 1..16: note = Description of Artificial Sequence: Syntheticpeptide
DRYFALVQPFRLTRWR

SEQ ID NO: 734 - protein, 17 aa, synthetic construct
  REGION 1..17: note = Description of Artificial Sequence: Syntheticpeptide
VRMTSEIETNIVAVERI

SEQ ID NO: 735 - protein, 20 aa, synthetic construct
  REGION 1..20: note = Description of Artificial Sequence: Syntheticpeptide
MERLWGLFQRAQQLSPRSSQ

SEQ ID NO: 736 - protein, 26 aa, synthetic construct
  REGION 1..26: note = Description of Artificial Sequence: Syntheticpeptide
MAEPQAESEPLLGGARGGGGDWPAGL

SEQ ID NO: 737 - protein, 27 aa, synthetic construct
  REGION 1..27: note = Description of Artificial Sequence: Syntheticpeptide
PETKGVALPETMKDAENLGRKAKPKEN

SEQ ID NO: 738 - protein, 27 aa, synthetic construct
  REGION 1..27: note = Description of Artificial Sequence: Syntheticpeptide
MEDEAVLDRGASFLKHVCDEEEVEGHH

SEQ ID NO: 739 - protein, 35 aa, synthetic construct
  REGION 1..35: note = Description of Artificial Sequence: Syntheticpolypeptide
YKMYGSEMLHKRDPLDEDEDTDISYKKLKEEEMAD

SEQ ID NO: 740 - protein, 49 aa, synthetic construct
  REGION 1..49: note = Description of Artificial Sequence: Syntheticpolypeptide
RHVSDLHGLTELILLPPPCPASFNADEDDRVDILGPQPESHQQLSASSH

SEQ ID NO: 741 - protein, 54 aa, synthetic construct
  REGION 1..54: note = Description of Artificial Sequence: Syntheticpolypeptide
CSRAARGTIGARRTGQPLKEDPSAVPVFSVDYGELDFQWREKTPEPPVPCVPEQ

SEQ ID NO: 742 - protein, 55 aa, synthetic construct
  REGION 1..55: note = Description of Artificial Sequence: Syntheticpolypeptide
RRKSIKKKRALRRFLETELVEPLTPSGTAPNQAQLRILKETELKRVKVLGSGAFG

SEQ ID NO: 743 - protein, 56 aa, synthetic construct
  REGION 1..56: note = Description of Artificial Sequence: Syntheticpolypeptide
RIRQKKAQGSTSSTRLHEPEKNAREITQDTNDITYADLNLPKGKKPAPQAAEPNNH

SEQ ID NO: 744 - protein, 57 aa, synthetic construct
  REGION 1..57: note = Description of Artificial Sequence: Syntheticpolypeptide
AVTISLAYSVKKMMKDNNLVRHLDACETMGNATAICSDKTGTLTTNRMTVVQSYLGD

SEQ ID NO: 745 - protein, 57 aa, synthetic construct
  REGION 1..57: note = Description of Artificial Sequence: Syntheticpolypeptide
CCRKKRREEKYEKEVHHDIREDVPPPKSRTSTARSYIGSNHSSLGSMSPSNMEGYSK

SEQ ID NO: 746 - protein, 57 aa, synthetic construct
  REGION 1..57: note = Description of Artificial Sequence: Syntheticpolypeptide
KRRQQKIRKYTMRRLLQETELVEPLTPSGAMPNQAQMRILKETELRKVKVLGSGAFG

SEQ ID NO: 747 - protein, 61 aa, synthetic construct
  REGION 1..61: note = Description of Artificial Sequence: Syntheticpolypeptide
KYLQKPMYEVQWKVVEEINGNNYVYIDPTQLPYDHKWEFPRNRLSFGKTLGAGAFGKVVEA

SEQ ID NO: 748 - protein, 64 aa, synthetic construct
  REGION 1..64: note = Description of Artificial Sequence: Syntheticpolypeptide
YTTYPLLKESALILLQTVPKQIDIRNLIKELRNVEGVEEVHELHVWQLAGSRIIATAHIKCEDP

SEQ ID NO: 749 - protein, 70 aa, synthetic construct
  REGION 1..70: note = Description of Artificial Sequence: Syntheticpolypeptide
AANAIAQSCQPSFYDGTIIVKKLPYLPRILGRNIGSHHVRVEHFMNHSITTLAKDTPLEEVVKVVTSTDV

SEQ ID NO: 750 - protein, 71 aa, synthetic construct
  REGION 1..71: note = Description of Artificial Sequence: Syntheticpolypeptide
WLHRRLPPQPIRPLPRFAPLVKTEPQRPVKEEEPKIPGDLDQEPSLLYADLDHLALSRPRRLSTADPADAS

SEQ ID NO: 751 - protein, 72 aa, synthetic construct
  REGION 1..72: note = Description of Artificial Sequence: Syntheticpolypeptide
KKYQPYKVIKQKLEGRPETEYRKAQTFSGHEDALDDFGIYEFVAFPDVSGVSRIPSRSVPASDCVSGQDLHS

SEQ ID NO: 752 - protein, 72 aa, synthetic construct
  REGION 1..72: note = Description of Artificial Sequence: Syntheticpolypeptide
MDEINNKIEEEKLVKANITLWEANMIKAYNASFSENSTGPPFFVHPADVPRGPCWETMVGQEFVRLTVSDVL

SEQ ID NO: 753 - protein, 73 aa, synthetic construct
  REGION 1..73: note = Description of Artificial Sequence: Syntheticpolypeptide
KTHRRKAARTAVGRNDTHPTTGSASPKHQKKSKLHGPTETSSCSGAAPTVEMDEELHYASLNFHGMNPSKDTS

SEQ ID NO: 754 - protein, 75 aa, synthetic construct
  REGION 1..75: note = Description of Artificial Sequence: Syntheticpolypeptide
RVKTRRKKAAQPVQNTDDVNPVMVSGSRGHQHQFQTGIVSDHPAEAGPISEDEQELHYAVLHFHKVQPQEPKVTD

SEQ ID NO: 755 - protein, 79 aa, synthetic construct
  REGION 1..79: note = Description of Artificial Sequence: Syntheticpolypeptide
IVLRRRRKRVNTKRSSRAFRAHLRAPLKGNCTHPEDMKLCTVIMKSNGSFPVNRRRVEAARRAQELEMEMLSSTSPPER

SEQ ID NO: 756 - protein, 79 aa, synthetic construct
  REGION 1..79: note = Description of Artificial Sequence: Syntheticpolypeptide
KARRKQAAGRPEKMDDEDPIMGTITSGSRKKPWPDSPGDQASPPGDAPPLEEQKELHYASLSFSEMKSREPKDQEAPST

SEQ ID NO: 757 - protein, 81 aa, synthetic construct
  REGION 1..81: note = Description of Artificial Sequence: Syntheticpolypeptide
KICRKEARKRAAAEQDVPSTLGPISQGHQHECSAGSSQDHPPPGAATYTPGKGEEQELHYASLSFQGLRLWEPADQEAPST

SEQ ID NO: 758 - protein, 84 aa, synthetic construct
  REGION 1..84: note = Description of Artificial Sequence: Syntheticpolypeptide
QRVVCQRYAGANGPFPHEYVSGTPHVPLNFIAPGGSQHGPFTGIACGKSMMSSVSLMGGRGGVPLYDRNHVTGASSSSSSSTKA

SEQ ID NO: 759 - protein, 84 aa, synthetic construct
  REGION 1..84: note = Description of Artificial Sequence: Syntheticpolypeptide
VRSCRKKSARPAAGVGDTGIEDANAVRGSASQGPLTEPWAEDSPPDQPPPASARSSVGEGELQYASLSFQMVKPWDSRGQEATD

SEQ ID NO: 760 - protein, 86 aa, synthetic construct
  REGION 1..86: note = Description of Artificial Sequence: Syntheticpolypeptide
FVAKIARPKNRAFSIRFTDTAVVAHMDGKPNLIFQVANTRPSPLTSVRVSAVLYQERENGKLYQTSVDFHLDGISSDECPFFIFPL

SEQ ID NO: 761 - protein, 66 aa, synthetic construct
  REGION 1..66: note = Description of Artificial Sequence: Syntheticpolypeptide
QLRRRGKTNHYQTTVEKKSLTIYAQVQKPGPLQKKLDSFPAQDPCTTIYVAATEPVPESVQETNSI

SEQ ID NO: 762 - protein, 89 aa, synthetic construct
  REGION 1..89: note = Description of Artificial Sequence: Syntheticpolypeptide
ILAKISRPKKRAKTITFSKNAVISKRGGKLCLLIRVANLRKSLLIGSHIYGKLLKTTVTPEGETIILDQININFVVDAGNENLFFISPL

SEQ ID NO: 763 - protein, 89 aa, synthetic construct
  REGION 1..89: note = Description of Artificial Sequence: Syntheticpolypeptide
FLAKIARPKKRAETIRFSQHAVVASHNGKPCLMIRVANMRKSLLIGCQVTGKLLQTHQTKEGENIRLNQVNVTFQVDTASDSPFLILPL

SEQ ID NO: 764 - protein, 54 aa, synthetic construct
  REGION 1..54: note = Description of Artificial Sequence: Syntheticpolypeptide
WFLKRERQEEYIEEKKRVDICRETPNICPHSGENTEYDTIPHTNRTILKEDPAN

SEQ ID NO: 765 - protein, 90 aa, synthetic construct
  REGION 1..90: note = Description of Artificial Sequence: Syntheticpolypeptide
KCYFLRKAKAKQMPVEMSRPAVPLLNSNNEKMSDPNMEANSHYGHNDDVRNHAMKPINDNKEPLNSDVQYTEVQVSSAESHKDLGKKDTE

SEQ ID NO: 766 - protein, 59 aa, synthetic construct
  REGION 1..59: note = Description of Artificial Sequence: Syntheticpolypeptide
LRKRRDSLSLSTQRTQGPAESARNLEYVSVSPTNNTVYASVTHSNRETEIWTPRENDTI

SEQ ID NO: 767 - protein, 67 aa, synthetic construct
  REGION 1..67: note = Description of Artificial Sequence: Syntheticpolypeptide
RLFKRRQGRIFPEGSCLNTFTKNPYAASKKTIYTYIMASRNTQPAESRIYDEILQSKVLPSKEEPVN

SEQ ID NO: 768 - protein, 101 aa, synthetic construct
  REGION 1..101: note = Description of Artificial Sequence: Syntheticpolypeptide
RRHQGKQNELSDTAGREINLVDAHLKSEQTEASTRQNSQVLLSETGIYDNDPDLCFRMQEGSEVYSNPCLEENKPGIVYASLNHSVIGPNSRLARNVKEAP

SEQ ID NO: 769 - protein, 102 aa, synthetic construct
  REGION 1..102: note = Description of Artificial Sequence: Syntheticpolypeptide
KYRHKRFAVSEQGNIPHSHDWVWLGNEVELLENPVDITLPSEECTTMIDRGLQFEERNFLLNGSSQKTFHSQLLRPSDYVYEKEIKNEPMNSSGPKRKRVKF

SEQ ID NO: 770 - protein, 102 aa, synthetic construct
  REGION 1..102: note = Description of Artificial Sequence: Syntheticpolypeptide
NSSYQEIEDDSDVEWKFARSKLWLSYFDDGKTLPPPFSLVPSPKSFVYFIMRIVNFPKCRRRRLQKDIEMGMGNSKSRLNLFTQSNSRVFESHSFNSILNQP

SEQ ID NO: 771 - protein, 104 aa, synthetic construct
  REGION 1..104: note = Description of Artificial Sequence: Syntheticpolypeptide
WRMMKYQQKAAGMSPEQVLQPLEGDLCYADLTLQLAGTSPQKATTKLSSAQVDQVEVEYVTMASLPKEDISYASLTLGAEDQEPTYCNMGHLSSHLPGRGPEEP

SEQ ID NO: 772 - protein, 105 aa, synthetic construct
  REGION 1..105: note = Description of Artificial Sequence: Syntheticpolypeptide
NNSYQEIEEDADVEWKFARAKLWLSYFDEGRTLPAPFNLVPSPKSFYYLIMRIKMCLIKLCKSKAKSCENDLEMGMLNSKFKKTRYQAGMRNSENLTANNTLSKP

SEQ ID NO: 773 - protein, 106 aa, synthetic construct
  REGION 1..106: note = Description of Artificial Sequence: Syntheticpolypeptide
QSVFNKRKSRVRHYLVKCPQNSSGETVTSVTSLAPLQPKKGKRQKEKPDIPPAVPAKAPIAPTFHKPKLLKPQRKVTLPKIAEENLTYAELELIKPHRAAKGAPTS

SEQ ID NO: 774 - protein, 117 aa, synthetic construct
  REGION 1..117: note = Description of Artificial Sequence: Syntheticpolypeptide
YRHRKKRNGLTSTYAGIRKVPSFTFTPTVTYQRGGEAVSSGGRPGLLNISEPAAQPWLADTWPNTGNNHNDCSISCCTAGNGNSDSNLTTYSRPADCIANYNNQLDNKQTNLMLPES

SEQ ID NO: 775 - protein, 123 aa, synthetic construct
  REGION 1..123: note = Description of Artificial Sequence: Syntheticpolypeptide
RYQRWKSKLYSIVCGKSTPEKEGELEGTTTKPLAPNPSFSPTPGFTPTLGFSPVPSSTFTSSSTYTPGDCPNFAAPRREVAPPYQGADPILATALASDPIPNPLQKWEDSAHKPQSLDTDDPA

SEQ ID NO: 776 - protein, 133 aa, synthetic construct
  REGION 1..133: note = Description of Artificial Sequence: Syntheticpolypeptide
VRLRLQKHRPPADPCRGETETMNNLANCQREKDISVSIIGATQIKNTNKKADFHGDHSADKNGFKARYPAVDYNLVQDLKGDDTAVRDAHSKRDTKCQPQGSSGEEKGTPTTLRGGEASERKRPDSGCSTSKD

SEQ ID NO: 777 - protein, 135 aa, synthetic construct
  REGION 1..135: note = Description of Artificial Sequence: Syntheticpolypeptide
RAWVVFKLSSAPRLHEQRVRDIQKQVREWKEQGSKTFMCTGRPGWLTVSLRVGKYKKTHKNIMINLMDILEVDTKKQIVRVEPLVTMGQVTALLTSIGWTLPVLPELDDLTVGGLIMGTGIESSSHKYGLFQHIC

SEQ ID NO: 778 - protein, 148 aa, synthetic construct
  REGION 1..148: note = Description of Artificial Sequence: Syntheticpolypeptide
TRDLVDDMGRHKSDRAINNRPCQILMGKSFKQKKWQDLCVGDVVCLRKDNIVPADMLLLASTEPSSLCYVETVDIDGETNLKFRQALMVTHKELATIKKMASFQGTVTCEAPNSRMHHFVGCLEWNDKKYSLDIGNLLLRGCRIRNTD

SEQ ID NO: 779 - protein, 162 aa, synthetic construct
  REGION 1..162: note = Description of Artificial Sequence: Syntheticpolypeptide
VFDPLGGKMAPYSSAGPSHLDSHDSSQLLNGLKTAATSVWETRIKLLCCCIGKDDHTRVAFSSTAELFSTYFSDTDLVPSDIAAGLALLHQQQDNIRNNQEPAQVVCHAPGSSQEADLDAELENCHHYMQFAAAAYGWPLYIYRNPLTGLCRIGGDCCRSRT

SEQ ID NO: 780 - protein, 89 aa, synthetic construct
  REGION 1..89: note = Description of Artificial Sequence: Syntheticpolypeptide
WRRKRKEKQSETSPKEFLTIYEDVKDLKTRRNHEQEQTFPGGGSTIYSMIQSQSSAPTSQEPAYTLYSLIQPSRKSGSRKRNHSPSFNS

SEQ ID NO: 781 - protein, 230 aa, synthetic construct
  REGION 1..230: note = Description of Artificial Sequence: Syntheticpolypeptide
RKRNNSRLGNGVLYASVNPEYFSAADVYVPDEWEVAREKITMSRELGQGSFGMVYEGVAKGVVKDEPETRVAIKTVNEAASMRERIEFLNEASVMKEFNCHHVVRLLGVVSQGQPTLVIMELMTRGDLKSYLRSLRPEMENNPVLAPPSLSKMIQMAGEIADGMAYLNANKFVHRDLAARNCMVAEDFTVKIGDFGMTRDIYETDYYRKGGKGLLPVRWMSPESLKDGVF

SEQ ID NO: 782 - protein, 238 aa, synthetic construct
  REGION 1..238: note = Description of Artificial Sequence: Syntheticpolypeptide
NKCGRRNKFGINRPAVLAPEDGLAMSLHFMTLGGSSLSPTEGKGSGLQGHIIENPQYFSDACVHHIKRRDIVLKWELGEGAFGKVFLAECHNLLPEQDKMLVAVKALKEASESARQDFQREAELLTMLQHQHIVRFFGVCTEGRPLLMVFEYMRHGDLNRFLRSHGPDAKLLAGGEDVAPGPLGLGQLLAVASQVAAGMVYLAGLHFVHRDLATRNCLVGQGLVVKIGDFGMSRDIYS

SEQ ID NO: 783 - protein, 249 aa, synthetic construct
  REGION 1..249: note = Description of Artificial Sequence: Syntheticpolypeptide
KLARHSKFGMKGPASVISNDDDSASPLHHISNGSNTPSSSEGGPDAVIIGMTKIPVIENPQYFGITNSQLKPDTFVQHIKRHNIVLKRELGEGAFGKVFLAECYNLCPEQDKILVAVKTLKDASDNARKDFHREAELLTNLQHEHIVKFYGVCVEGDPLIMVFEYMKHGDLNKFLRAHGPDAVLMAEGNPPTELTQSQMLHIAQQIAAGMVYLASQHFVHRDLATRNCLVGENLLVKIGDFGMSRDVYS

SEQ ID NO: 784 - protein, 263 aa, synthetic construct
  REGION 1..263: note = Description of Artificial Sequence: Syntheticpolypeptide
NCVSCCKDPEIDFKEFEDNFDDEIDFTPPAEDTPSVQSPAEVFTLSVPNISLPAPSQFQPSVEGLKSQVARHSLNYIQEIGNGWFGKVLLGEIYTGTSVARVIVKELKASANPKEQDTFLKNGEPYYILQHPNILQCVGQCVEAIPYLLVFEFCDLGDLKAYLRSEQEHMRGDSQTMLLQRMACEVAAGLAAMHKLHFLHSDLALRNCFLTSDLNVKVGDYGIGFSRYKEDYIETDDKKVFPLRWTAPELVTSFQDRLLTADQ

SEQ ID NO: 785 - protein, 271 aa, synthetic construct
  REGION 1..271: note = Description of Artificial Sequence: Syntheticpolypeptide
YKRKTQDADRTLKRLQLQMDNLESRVALECKEAFAELQTDINELTNHMDEVQIPFLDYRTYAVRVLFPGIEAHPVLKELDTPPNVEKALRLFGQLLHSRAFVLTFIHTLEAQSSFSMRDRGTVASLTMVALQSRLDYATGLLKQLLADLIEKNLESKNHPKLLLRRTESVAEKMLTNWFTFLLHKFLKECAGEPLFLLYCAIKQQMEKGPIDAITGEARYSLSEDKLIRQQIDYKTLTLHCVCPENEGSAQVPVKVLNCDSITQAKDKLLD

SEQ ID NO: 786 - protein, 147 aa, synthetic construct
  REGION 1..147: note = Description of Artificial Sequence: Syntheticpolypeptide
KRKGRCSVPAFCSSQAEAPADTPEPTAGHTLYSVLSQGYEKLDTPLRPARQQPTPTSDSSSDSNLTTEEDEDRPEVHKPISGRYEVFDQVTQEGAGHDPAPEGQADYDPVTPYVTEVESVVGENTMYAQVFNLQGKTPVSQKEESSA

SEQ ID NO: 787 - protein, 272 aa, synthetic construct
  REGION 1..272: note = Description of Artificial Sequence: Syntheticpolypeptide
KRVQETKFGNAFTEEDSELVVNYIAKKSFCRRAIELTLHSLGVSEELQNKLEDVVIDRNLLILGKILGEGEFGSVMEGNLKQEDGTSLKVAVKTMKLDNSSQREIEEFLSEAACMKDFSHPNVIRLLGVCIEMSSQGIPKPMVILPFMKYGDLHTYLLYSRLETGPKHIPLQTLLKFMVDIALGMEYLSNRNFLHRDLAARNCMLRDDMTVCVADFGLSKKIYSGDYYRQGRIAKMPVKWIAIESLADRVYTSKSDVWAFGVTMWEIATRGM

SEQ ID NO: 788 - protein, 277 aa, synthetic construct
  REGION 1..277: note = Description of Artificial Sequence: Syntheticpolypeptide
SRQQRRREARGRGDASGLKRNSERKTPEGRASPAPGSGHPEGPGAHLDMNSLDRAQAAKNKGNKYFKAGKYEQAIQCYTEAISLCPTEKNVDLSTFYQNRAAAFEQLQKWKEVAQDCTKAVELNPKYVKALFRRAKAHEKLDNKKECLEDVTAVCILEGFQNQQSMLLADKVLKLLGKEKAKEKYKNREPLMPSPQFIKSYFSSFTDDIISQPMLKGEKSDEDKDKEGEALEVKENSGYLKAKQYMEEENYDKIISECSKEIDAEGKYMAEALLLRA

SEQ ID NO: 789 - protein, 280 aa, synthetic construct
  REGION 1..280: note = Description of Artificial Sequence: Syntheticpolypeptide
LRKRRKETRFGQAFDSVMARGEPAVHFRAARSFNRERPERIEATLDSLGISDELKEKLEDVLIPEQQFTLGRMLGKGEFGSVREAQLKQEDGSFVKVAVKMLKADIIASSDIEEFLREAACMKEFDHPHVAKLVGVSLRSRAKGRLPIPMVILPFMKHGDLHAFLLASRIGENPFNLPLQTLIRFMVDIACGMEYLSSRNFIHRDLAARNCMLAEDMTVCVADFGLSRKIYSGDYYRQGCASKLPVKWLALESLADNLYTVQSDVWAFGVTMWEIMTRGQ

SEQ ID NO: 790 - protein, 275 aa, synthetic construct
  REGION 1..275: note = Description of Artificial Sequence: Syntheticpolypeptide
HRRKKETRYGEVFEPTVERGELVVRYRVRKSYSRRTTEATLNSLGISEELKEKLRDVMVDRHKVALGKTLGEGEFGAVMEGQLNQDDSILKVAVKTMKIAICTRSELEDFLSEAVCMKEFDHPNVMRLIGVCFQGSERESFPAPVVILPFMKHGDLHSFLLYSRLGDQPVYLPTQMLVKFMADIASGMEYLSTKRFIHRDLAARNCMLNENMSVCVADFGLSKKIYNGDYYRQGRIAKMPVKWIAIESLADRVYTSKSDVWSFGVTMWEIATRGQ

SEQ ID NO: 791 - protein, 285 aa, synthetic construct
  REGION 1..285: note = Description of Artificial Sequence: Syntheticpolypeptide
KRIELDDSISASSSSQGLSQPSTQTTQYLRADTPNNATPITSYPTLRIEKNDLRSVTLLEAKGKVKDIAISRERITLKDVLQEGTFGRIFHGILIDEKDPNKEKQAFVKTVKDQASEIQVTMMLTESCKLRGLHHRNLLPITHVCIEEGEKPMVILPYMNWGNLKLFLRQCKLVEANNPQAISQQDLVHMAIQIACGMSYLARREVIHKDLAARNCVIDDTLQVKITDNALSRDLFPMDYHCLGDNENRPVRWMALESLVNNEFSSASDVWAFGVTLWELMTLGQ

SEQ ID NO: 792 - protein, 293 aa, synthetic construct
  REGION 1..293: note = Description of Artificial Sequence: Syntheticpolypeptide
NCRTWWQVLDSLLNSQRKRLHNAASKLHKLKSEGFMKVLKCEVELMARMAKTIDSFTQNQTRLVVIIDGLDACEQDKVLQMLDTVRVLFSKGPFIAIFASDPHIIIKAINQNLNSVLRDSNINGHDYMRNIVHLPVFLNSRGLSNARKFLVTSATNGDVPCSDTTGIQEDADRRVSQNSLGEMTKLGSKTALNRRDTYRRRQMQRTITRQMSFDLTKLLVTEDWFSDISPQTMRRLLNIVSVTGRLLRANQISFNWDRLASWINLTEQWPYRTSWLILYLEETEGIPDQMTLK

SEQ ID NO: 793 - protein, 300 aa, synthetic construct
  REGION 1..300: note = Description of Artificial Sequence: Syntheticpolypeptide
MFNYTFQQVQEHTDQIWKFQRHDLIEEYHGRPAAPPPFILLSHLQLFIKRVVLKTPAKRHKQLKNKLEKNEEAALLSWEIYLKENYLQNRQFQQKQRPEQKIEDISNKVDAMVDLLDLDPLKRSGSMEQRLASLEEQVAQTAQALHWIVRTLRASGFSSEADVPTLASQKAAEEPDAEPGGRKKTEEPGDSYHVNARHLLYPNCPVTRFPVPNEKVPWETEFLIYDPPFYTAERKDAAAMDPMGDTLEPLSTIQYNVVDGLRDRRSFHGPYTVQAGLPLNPMGRTGLRGRGSLSCFGPNH

SEQ ID NO: 794 - protein, 344 aa, synthetic construct
  REGION 1..344: note = Description of Artificial Sequence: Syntheticpolypeptide
AYKRKSRESDLTLKRLQMQMDNLESRVALECKEAFAELQTDIHELTSDLDGAGIPFLDYRTYTMRVLFPGIEDHPVLRDLEVPGYRQERVEKGLKLFAQLINNKVFLLSFIRTLESQRSFSMRDRGNVASLIMTVLQSKLEYATDVLKQLLADLIDKNLESKNHPKLLLRRTESVAEKMLTNWFTFLLYKFLKECAGEPLFSLFCAIKQQMEKGPIDAITGEARYSLSEDKLIRQQIDYKTLVLSCVSPDNANSPEVPVKILNCDTITQVKEKILDAIFKNVPCSHRPKAADMDLEWRQGSGARMILQDEDITTKIENDWKRLNTLAHYQVPDGSVVALVSKQV

SEQ ID NO: 795 - protein, 345 aa, synthetic construct
  REGION 1..345: note = Description of Artificial Sequence: Syntheticpolypeptide
RWHCPRRLLGACWTLNGQEEPVSQPTPQLENEVSRQHLPATLPEMVAFYQELHTPTQGQTMVRQLMHKLLVFSAREVDHRGGCLMLQDTGISLLIPPGAVAVGRQERVSLILVWDLSDAPSLSQAQGLVSPVVACGPHGASFLKPCTLTFKHCAEQPSHARTYSSNTTLLDAKVWRPLGRPGAHASRDECRIHLSHFSLYTCVLEAPVGREARKWLQLAVFCSPLVPGQSHLQLRIYFLNNTPCALQWALTNEQPHGGRLRGPCQLFDFNGARGDQCLKLTYISEGWENVDDSSCQLVPHLHIWHGKCPFRSFCFRRKAADENEDCSALTNEIIVTMHTFQDGLE

SEQ ID NO: 796 - protein, 354 aa, synthetic construct
  REGION 1..354: note = Description of Artificial Sequence: Syntheticpolypeptide
KQKPRYEIRWRVIESISPDGHEYIYVDPMQLPYDSRWEFPRDGLVLGRVLGSGAFGKVVEGTAYGLSRSQPVMKVAVKMLKPTARSSEKQALMSELKIMTHLGPHLNIVNLLGACTKSGPIYIITEYCFYGDLVNYLHKNRDSFLSHHPEKPKKELDIFGLNPADESTRSYVILSFENNGDYMDMKQADTTQYVPMLERKEVSKYSDIQRSLYDRPASYKKKSMLDSEVKNLLSDDNSEGLTLLDLLSFTYQVARGMEFLASKNCVHRDLAARNVLLAQGKIVKICDFGLARDIMHDSNYVSKGSTFLPVKWMAPESIFDNLYTTLSDVWSYGILLWEIFSLGGTPYPGMMVDS

SEQ ID NO: 797 - protein, 377 aa, synthetic construct
  REGION 1..377: note = Description of Artificial Sequence: Syntheticpolypeptide
CCCKQRQPEGLGTRFAPVPEGGEGVMQSWRIEGAHPEDRDVSNICAPMTASNTQDRMDSSEIYTNTYAAGGTVEGGVSGVELNTGMGTAVGLMAAGAAGASGAARKRSSTMGTLRDYADADINMAFLDSYFSEKAYAYADEDEGRPANDCLLIYDHEGVGSPVGSIGCCSWIVDDLDESCMETLDPKFRTLAEICLNTEIEPFPSHQACIPISTDLPLLGPNYFVNESSGLTPSEVEFQEEMAASEPVVHGDIIVTETYGNADPCVQPTTIIFDPQLAPNVVVTEAVMAPVYDIQGNICVPAELADYNNVIYAERVLASPGVPDMSNSSTTEGCMGPVMSGNILVGPEIQVMQMMSPDLPIGQTVGSTSPMTSRHRV

SEQ ID NO: 798 - protein, 406 aa, synthetic construct
  REGION 1..406: note = Description of Artificial Sequence: Syntheticpolypeptide
SNKCDVVVVGGGISGMAAAKLLHDSGLNVVVLEARDRVGGRTYTLRNQKVKYVDLGGSYVGPTQNRILRLAKELGLETYKVNEVERLIHHVKGKSYPFRGPFPPVWNPITYLDHNNFWRTMDDMGREIPSDAPWKAPLAEEWDNMTMKELLDKLCWTESAKQLATLFVNLCVTAETHEVSALWFLWYVKQCGGTTRIISTTNGGQERKFVGGSGQVSERIMDLLGDRVKLERPVIYIDQTRENVLVETLNHEMYEAKYVISAIPPTLGMKIHFNPPLPMMRNQMITRVPLGSVIKCIVYYKEPFWRKKDYCGTMIIDGEEAPVAYTLDDTKPEGNYAAIMGFILAHKARKLARLTKEERLKKLCELYAKVLGSLEALEPVHYEEKNWCEEQYSGGCYTTYFPPGIL

SEQ ID NO: 799 - protein, 416 aa, synthetic construct
  REGION 1..416: note = Description of Artificial Sequence: Syntheticpolypeptide
MENQEKASIAGHMFDVVVIGGGISGLSAAKLLTEYGVSVLVLEARDRVGGRTYTIRNEHVDYVDVGGAYVGPTQNRILRLSKELGIETYKVNVSERLVQYVKGKTYPFRGAFPPVWNPIAYLDYNNLWRTIDNMGKEIPTDAPWEAQHADKWDKMTMKELIDKICWTKTARRFAYLFVNINVTSEPHEVSALWFLWYVKQCGGTTRIFSVTNGGQERKFVGGSGQVSERIMDLLGDQVKLNHPVTHVDQSSDNIIIETLNHEHYECKYVINAIPPTLTAKIHFRPELPAERNQLIQRLPMGAVIKCMMYYKEAFWKKKDYCGCMIIEDEDAPISITLDDTKPDGSLPAIMGFILARKADRLAKLHKEIRKKKICELYAKVLGSQEALHPVHYEEKNWCEEQYSGGCYTAYFPPGIM

SEQ ID NO: 800 - protein, 470 aa, synthetic construct
  REGION 1..470: note = Description of Artificial Sequence: Syntheticpolypeptide
CCDCGGAPRSAAGFEPVPECSDGAIHSWAVEGPQPEPRDITTVIPQIPPDNANIIECIDNSGVYTNEYGGREMQDLGGGERMTGFELTEGVKTSGMPEICQEYSGTLRRNSMRECREGGLNMNFMESYFCQKAYAYADEDEGRPSNDCLLIYDIEGVGSPAGSVGCCSFIGEDLDDSFLDTLGPKFKKLADISLGKESYPDLDPSWPPQSTEPVCLPQETEPVVSGHPPISPHFGTTTVISESTYPSGPGVLHPKPILDPLGYGNVTVTESYTTSDTLKPSVHVHDNRPASNVVVTERVVGPISGADLHGMLEMPDLRDGSNVIVTERVIAPSSSLPTSLTIHHPRESSNVVVTERVIQPTSGMIGSLSMHPELANAHNVIVTERVVSGAGVTGISGTTGISGGIGSSGLVGTSMGAGSGALSGAGISGGGIGLSSLGGTASIGHMRSSSDHHFNQTIGSASPSTARSRI

SEQ ID NO: 801 - protein, 534 aa, synthetic construct
  REGION 1..534: note = Description of Artificial Sequence: Syntheticpolypeptide
NLEGVMNQADAPRPLNWTIRKLCHAAFLPSVRLLKAQKSWIERAFYKRECVHIIPSTKDPHRCCCGRLIGQHVGLTPSISVLQNEKNESRLSRNDIQSEKWSISKHTQLSPTDAFGTIEFQGGGHSNKAMYVRVSFDTKPDLLLHLMTKEWQLELPKLLISVHGGLQNFELQPKLKQVFGKGLIKAAMTTGAWIFTGGVNTGVIRHVGDALKDHASKSRGKICTIGIAPWGIVENQEDLIGRDVVRPYQTMSNPMSKLTVLNSMHSHFILADNGTTGKYGAEVKLRRQLEKHISLQKINTRCLPFFSLDSRLFYSFWGSCQLDSVGIGQGVPVVALIVEGGPNVISIVLEYLRDTPPVPVVVCDGSGRASDILAFGHKYSEEGGLINESLRDQLLVTIQKTFTYTRTQAQHLFIILMECMKKKELITVFRMGSEGHQDIDLAILTALLKGANASAPDQLSLALAWNRVDIARSQIFIYGQQWPVGSLEQAMLDALVLDRVDFVKLLIENGVSMHRFLTISRLEELYNTRHGPSN

SEQ ID NO: 802 - protein, 771 aa, synthetic construct
  REGION 1..771: note = Description of Artificial Sequence: Syntheticpolypeptide
ELFANKRKYTSSYEALKGKKFIVVCGNITVDSVTAFLRNFLRDKSGEINTEIVFLGETPPSLELETIFKCYLAYTTFISGSAMKWEDLRRVAVESAEACLIIANPLCSDSHAEDISNIMRVLSIKNYDSTTRIIIQILQSHNKVYLPKIPSWNWDTGDNIICFAELKLGFIAQGCLVPGLCTFLTSLFVEQNKKVMPKQTWKKHFLNSMKNKILTQRLSDDFAGMSFPEVARLCFLKMHLLLIAIEYKSLFTDGFCGLILNPPPQVRIRKNTLGFFIAETPKDVRRALFYCSVCHDDVFIPELITNCGCKSRSRQHITVPSVKRMKKCLKGISSRISGQDSPPRVSASTSSISNFTTRTLQHDVEQDSDQLDSSGMFHWCKPTSLDKVTLKRTGKSKYKFRNHIVACVFGDAHSAPMGLRNFVMPLRASNYTRKELKDIVFIGSLDYLQREWRFLWNFPQIYILPGCALYSGDLHAANIEQCSMCAVLSPPPQPSSNQTLVDTEAIMATLTIGSLQIDSSSDPSPSVSEETPGYTNGHNEKSNCRKVPILTELKNPSNIHFIEQLGGLEGSLQETNLHLSTAFSTGTVFSGSFLDSLLATAFYNYHVLELLQMLVTGGVSSQLEQHLDKDKVYGVADSCTSLLSGRNRCKLGLLSLHETILSDVNPRNTFGQLFCGSLDLFGILCVGLYRIIDEEELNPENKRFVITRPANEFKLLPSDLVFCAIPFSTACYKRNEEFSLQKSYEIVNKASQTTETHSDTNCPPTIDSVTE

SEQ ID NO: 803 - protein, 813 aa, synthetic construct
  REGION 1..813: note = Description of Artificial Sequence: Syntheticpolypeptide
QFEELVYLWMERQKSGGNYSRHRAQTEKHVVLCVSSLKIDLLMDFLNEFYAHPRLQDYYVVILCPTEMDVQVRRVLQIPLWSQRVIYLQGSALKDQDLMRAKMDNGEACFILSSRNEVDRTAADHQTILRAWAVKDFAPNCPLYVQILKPENKFHVKFADHVVCEEECKYAMLALNCICPATSTLITLLVHTSRGQEGQESPEQWQRMYGRCSGNEVYHIRMGDSKFFREYEGKSFTYAAFHAHKKYGVCLIGLKREDNKSILLNPGPRHILAASDTCFYINITKEENSAFIFKQEEKRKKRAFSGQGLHEGPARLPVHSIIASMGTVAMDLQGTEHRPTQSGGGGGGSKLALPTENGSGSRRPSIAPVLELADSSALLPCDLLSDQSEDEVTPSDDEGLSVVEYVKGYPPNSPYIGSSPTLCHLLPVKAPFCCLRLDKGCKHNSYEDAKAYGFKNKLIIVSAETAGNGLYNFIVPLRAYYRSRKELNPIVLLLDNKPDHHFLEAICCFPMVYYMEGSVDNLDSLLQCGIIYADNLVVVDKESTMSAEEDYMADAKTIVNVQTMFRLFPSLSITTELTHPSNMRFMQFRAKDSYSLALSKLEKRERENGSNLAFMFRLPFAAGRVFSISMLDTLLYQSFVKDYMITITRLLLGLDTTPGSGYLCAMKITEGDLWIRTYGRLFQKLCSSSAEIPIGIYRTESHVFSTSESQISVNVEDCEDTREVKGPWGSRAGTGGSSQGRHTGGGDPAEHPLLRRKSLQWARRLSRKAPKQAGRAAAAEWISQQRLSLYRRSERQELSELVKNRMKHLGLPT

SEQ ID NO: 804 - protein, 1202 aa, synthetic construct
  REGION 1..1202: note = Description of Artificial Sequence: Syntheticpolypeptide
MSGGASATGPRRGPPGLEDTTSKKKQKDRANQESKDGDPRKETGSRYVAQAGLEPLASGDPSASASHAAGITGSRHRTRLFFPSSSGSASTPQEEQTKEGACEDPHDLLATPTPELLLDWRQSAEEVIVKLRVGVGPLQLEDVDAAFTDTDCVVRFAGGQQWGGVFYAEIKSSCAKVQTRKGSLLHLTLPKKVPMLTWPSLLVEADEQLCIPPLNSQTCLLGSEENLAPLAGEKAVPPGNDPVSPAMVRSRNPGKDDCAKEEMAVAADAATLVDEPESMVNLAFVKNDSYEKGPDSVVVHVYVKEICRDTSRVLFREQDFTLIFQTRDGNFLRLHPGCGPHTTFRWQVKLRNLIEPEQCTFCFTASRIDICLRKRQSQRWGGLEAPAARVGGAKVAVPTGPTPLDSTPPGGAPHPLTGQEEARAVEKDKSKARSEDTGLDSVATRTPMEHVTPKPETHLASPKPTCMVPPMPHSPVSGDSVEEEEEEEKKVCLPGFTGLVNLGNTCFMNSVIQSLSNTRELRDFFHDRSFEAEINYNNPLGTGGRLAIGFAVLLRALWKGTHHAFQPSKLKAIVASKASQFTGYAQHDAQEFMAFLLDGLHEDLNRIQNKPYTETVDSDGRPDEVVAEEAWQRHKMRNDSFIVDLFQGQYKSKLVCPVCAKVSITFDPFLYLPVPLPQKQKVLPVFYFAREPHSKPIKFLVSVSKENSTASEVLDSLSQSVHVKPENLRLAEVIKNRFHRVFLPSHSLDTVSPSDTLLCFELLSSELAKERVVVLEVQQRPQVPSVPISKCAACQRKQQSEDEKLKRCTRCYRVGYCNQLCQKTHWPDHKGLCRPENIGYPFLVSVPASRLTYARLAQLLEGYARYSVSVFQPPFQPGRMALESQSPGCTTLLSTGSLEAGDSERDPIQPPELQLVTPMAEGDTGLPRVWAAPDRGPVPSTSGISSEMLASGPIEVGSLPAGERVSRPEAAVPGYQHPSEAMNAHTPQFFIYKIDSSNREQRLEDKGDTPLELGDDCSLALVWRNNERLQEFVLVASKELECAEDPGSAGEAARAGHFTLDQCLNLFTRPEVLAPEEAWYCPQCKQHREASKQLLLWRLPNVLIVQLKRFSFRSFIWRDKINDLVEFPVRNLDLSKFCIGQKEEQLPSYDLYAVINHYGGMIGGHYTACARLPNDRSSQRSDVGWRLFDDSTVTTVDESQVV

SEQ ID NO: 805 - protein, 1424 aa, synthetic construct
  REGION 1..1424: note = Description of Artificial Sequence: Syntheticpolypeptide
MADGGEGEDEIQFLRTDDEVVLQCTATIHKEQQKLCLAAEGFGNRLCFLESTSNSKNVPPDLSICTFVLEQSLSVRALQEMLANTVEKSEGQVDVEKWKFMMKTAQGGGHRTLLYGHAILLRHSYSGMYLCCLSTSRSSTDKLAFDVGLQEDTTGEACWWTIHPASKQRSEGEKVRVGDDLILVSVSSERYLHLSYGNGSLHVDAAFQQTLWSVAPISSGSEAAQGYLIGGDVLRLLHGHMDECLTVPSGEHGEEQRRTVHYEGGAVSVHARSLWRLETLRVAWSGSHIRWGQPFRLRHVTTGKYLSLMEDKNLLLMDKEKADVKSTAFTFRSSKEKLDVGVRKEVDGMGTSEIKYGDSVCYIQHVDTGLWLTYQSVDVKSVRMGSIQRKAIMHHEGHMDDGISLSRSQHEESRTARVIRSTVFLFNRFIRGLDALSKKAKASTVDLPIESVSLSLQDLIGYFHPPDEHLEHEDKQNRLRALKNRQNLFQEEGMINLVLECIDRLHVYSSAAHFADVAGREAGESWKSILNSLYELLAALIRGNRKNCAQFSGSLDWLISRLERLEASSGILEVLHCVLVESPEALNIIKEGHIKSIISLLDKHGRNHKVLDVLCSLCVCHGVAVRSNQHLICDNLLPGRDLLLQTRLVNHVSSMRPNIFLGVSEGSAQYKKWYYELMVDHTEPFVTAEATHLRVGWASTEGYSPYPGGGEEWGGNGVGDDLFSYGFDGLHLWSGCIARTVSSPNQHLLRTDDVISCCLDLSAPSISFRINGQPVQGMFENFNIDGLFFPVVSFSAGIKVRFLLGGRHGEFKFLPPPGYAPCYEAVLPKEKLKVEHSREYKQERTYTRDLLGPTVSLTQAAFTPIPVDTSQIVLPPHLERIREKLAENIHELWVMNKIELGWQYGPVRDDNKRQHPCLVEFSKLPEQERNYNLQMSLETLKTLLALGCHVGISDEHAEDKVKKMKLPKNYQLTSGYKPAPMDLSFIKLTPSQEAMVDKLAENAHNVWARDRIRQGWTYGIQQDVKNRRNPRLVPYTLLDDRTKKSNKDSLREAVRTLLGYGYNLEAPDQDHAARAEVCSGTGERFRIFRAEKTYAVKAGRWYFEFETVTAGDMRVGWSRPGCQPDQELGSDERAFAFDGFKAQRWHQGNEHYGRSWQAGDVVGCMVDMNEHTMMFTLNGEILLDDSGSELAFKDFDVGDGFIPVCSLGVAQVGRMNFGKDVSTLKYFTICGLQEGYEPFAVNTNRDITMWLSKRLPQFLQVPSNHEHIEVTRIDGTIDSSPCLKVTQKSFGSQNSNTDIMFYRLSMPIECAEVFSKTVAGGLPGAGLFGPKNDLEDYDADSDFEVLMKTAHGHLVPDRVDKDKEATKPEFNNHKDYAQEKPSRLKQRFLLRRTKPDYSTSHSARLTEDVLADDRDDYDFLMQTS

SEQ ID NO: 806 - protein, 4 aa, synthetic construct
  REGION 1..4: note = Description of Artificial Sequence: Syntheticpeptide
KIHK

SEQ ID NO: 807 - protein, 4 aa, synthetic construct
  REGION 1..4: note = Description of Artificial Sequence: Syntheticpeptide
KTSK

SEQ ID NO: 808 - protein, 4 aa, synthetic construct
  REGION 1..4: note = Description of Artificial Sequence: Syntheticpeptide
KIHR

SEQ ID NO: 809 - protein, 4 aa, synthetic construct
  REGION 1..4: note = Description of Artificial Sequence: Syntheticpeptide
CVRS

SEQ ID NO: 810 - protein, 4 aa, synthetic construct
  REGION 1..4: note = Description of Artificial Sequence: Syntheticpeptide
QYSK

SEQ ID NO: 811 - protein, 7 aa, synthetic construct
  REGION 1..7: note = Description of Artificial Sequence: Syntheticpeptide
LFEENKL

SEQ ID NO: 812 - protein, 15 aa, synthetic construct
  REGION 1..15: note = Description of Artificial Sequence: Syntheticpeptide
KAENIIMMETAQTSL

SEQ ID NO: 813 - protein, 16 aa, synthetic construct
  REGION 1..16: note = Description of Artificial Sequence: Syntheticpeptide
YVISEEKDECVIATEV

SEQ ID NO: 814 - protein, 19 aa, synthetic construct
  REGION 1..19: note = Description of Artificial Sequence: Syntheticpeptide
NHSKESKPTFSRATALDNV

SEQ ID NO: 815 - protein, 22 aa, synthetic construct
  REGION 1..22: note = Description of Artificial Sequence: Syntheticpeptide
RKAVPDAVESRYSRTEGSLDGT

SEQ ID NO: 816 - protein, 27 aa, synthetic construct
  REGION 1..27: note = Description of Artificial Sequence: Syntheticpeptide
KIHTGQPLRGPGFGLQLEREMSGMVPK

SEQ ID NO: 817 - protein, 37 aa, synthetic construct
  REGION 1..37: note = Description of Artificial Sequence: Syntheticpolypeptide
VFPSGMGTSSPARRGSADGPRSAQPLRPEDGHCSWPL

SEQ ID NO: 818 - protein, 48 aa, synthetic construct
  REGION 1..48: note = Description of Artificial Sequence: Syntheticpolypeptide
QTSPQPASEDTLTYADLDMVHLNRTPKQPAPKPEPSFSEYASVQVPRK

SEQ ID NO: 819 - protein, 60 aa, synthetic construct
  REGION 1..60: note = Description of Artificial Sequence: Syntheticpolypeptide
YSYQPRTNSLSFPKQIAWNQSRTNSIISSQIPLGDNAKENERKTSDEVYDEDPFAYSEPL

SEQ ID NO: 820 - protein, 70 aa, synthetic construct
  REGION 1..70: note = Description of Artificial Sequence: Syntheticpolypeptide
MKRLIKRYVLKAQVDKENDEVNEGELKEIKQDISSLRYELLEDKSQATEELAILIHKLSEKLNPSMLRCE

SEQ ID NO: 821 - protein, 75 aa, synthetic construct
  REGION 1..75: note = Description of Artificial Sequence: Syntheticpolypeptide
IRQPVGRIFFAGTETATKWSGYMEGAVEAGERAAREVLNGLGKVTEKDIWVQEPESKDVPAVEITHTFWERNLPS

SEQ ID NO: 822 - protein, 76 aa, synthetic construct
  REGION 1..76: note = Description of Artificial Sequence: Syntheticpolypeptide
LRQPVDRIYFAGTETATHWSGYMEGAVEAGERAAREILHAMGKIPEDEIWQSEPESVDVPAQPITTTFLERHLPSV

SEQ ID NO: 823 - protein, 79 aa, synthetic construct
  REGION 1..79: note = Description of Artificial Sequence: Syntheticpolypeptide
MKRLIKRYVLKAQVDRENDEVNEGELKEIKQDISSLRYELLEEKSQATGELADLIQQLSEKFGKNLNKDHLRVNKGKDI

SEQ ID NO: 824 - protein, 83 aa, synthetic construct
  REGION 1..83: note = Description of Artificial Sequence: Syntheticpolypeptide
LFYRRRNSPVERPPRAGHSEHHPDLGPAAEAAASQASRIWQELEAEEEPVPEGSGPLGPWGPQDWVGPLPRGPTTPDEGCLRY

SEQ ID NO: 825 - protein, 136 aa, synthetic construct
  REGION 1..136: note = Description of Artificial Sequence: Syntheticpolypeptide
LRFQASEEESWAAPPPVSQPPPCNRLPPELFEQLRMLLEPNSITGNDWRRLASHLGLCGMKIRFLSCQRSPAAAILELFEEQNGSLQELHYLMTVMERLDCASAIQNYLSGTHGGSPGPERGGARDNQGLELDEKL

SEQ ID NO: 826 - protein, 141 aa, synthetic construct
  REGION 1..141: note = Description of Artificial Sequence: Syntheticpolypeptide
ENSEIYDYLRQGNRLKQPADCLDGLYALMSRCWELNPQDRPSFTELREDLENTLKALPPAQEPDEILYVNMDEGGGYPEPPGAAGGADPPTQPDPKDSCSCLTAAEVHPAGRYVLCPSTTPSPAQPADRGSPAAPGQEDGA

SEQ ID NO: 827 - protein, 151 aa, synthetic construct
  REGION 1..151: note = Description of Artificial Sequence: Syntheticpolypeptide
TRWRRNEDGAICRKSIKKMLEVLVVKLPLSEHWALPGGSREPGEMLPRKLKRILRQEHWPSFENLLKCGMEVYKGYMDDPRNTDNAWIETVAVSVHFQDQNDVELNRLNSNLHACDSGASIRWQVVDRRIPLYANHKTLLQKAAAEFGAHY

SEQ ID NO: 828 - protein, 172 aa, synthetic construct
  REGION 1..172: note = Description of Artificial Sequence: Syntheticpolypeptide
WSFGVVLWEIATLAEQPYQGLSNEQVLRFVMEGGLLDKPDNCPDMLFELMRMCWQYNPKMRPSFLEIISSIKEEMEPGFREVSFYYSEENKLPEPEELDLEPENMESVPLDPSASSSSLPLPDRHSGHKAENGPGPGVLVLRASFDERQPYAHMNGGRKNERALPLPQSSTC

SEQ ID NO: 829 - protein, 180 aa, synthetic construct
  REGION 1..180: note = Description of Artificial Sequence: Syntheticpolypeptide
KSGYRMAKPDHATSEVYEIMVKCWNSEPEKRPSFYHLSEIVENLLPGQYKKSYEKIHLDFLKSDHPAVARMRVDSDNAYIGVTYKNEEDKLKDWEGGLDEQRLSADSGYIIPLPDIDPVPEEEDLGKRNRHSSQTSEESAIETGSSSSTFIKREDETIEDIDMMDDIGIDSSDLVEDSFL

SEQ ID NO: 830 - protein, 195 aa, synthetic construct
  REGION 1..195: note = Description of Artificial Sequence: Syntheticpolypeptide
QNHEMYDYLLHGHRLKQPEDCLDELYEIMYSCWRTDPLDRPTFSVLRLQLEKLLESLPDVRNQADVIYVNTQLLESSEGLAQGSTLAPLDLNIDPDSIIASCTPRAAISVVTAEVHDSKPHEGRYILNGGSEEWEDLTSAPSAAVTAEKNSVLPGERLVRNGVSWSHSSMLPLGSSLPDELLFADDSSEGSEVLM

SEQ ID NO: 831 - protein, 274 aa, synthetic construct
  REGION 1..274: note = Description of Artificial Sequence: Syntheticpolypeptide
CETLQFLDCICGSTTGGLGLLGLYINEKNVALINQTLESLTEYCQGPCHENQNCIATHESNGIDIITALILNDINPLGKKRMDLVLELKNNASKLLLAIMESRHDSENAERILYNMRPKELVEVIKKAYMQGEVEFEDGENGEDGAASPRNVGHNIYILAHQLARHNKELQSMLKPGGQVDGDEALEFYAKHTAQIEIVRLDRTMEQIVFPVPSICEFLTKESKLRIYYTTERDEQGSKINDFFLRSEDLFNEMNWQKKLRAQPVLYWCARNMS

SEQ ID NO: 832 - protein, 275 aa, synthetic construct
  REGION 1..275: note = Description of Artificial Sequence: Syntheticpolypeptide
CETLQFLDCICGSTTGGLGLLGLYINEKNVALVNQNLESLTEYCQGPCHENQTCIATHESNGIDIIIALILNDINPLGKYRMDLVLQLKNNASKLLLAIMESRHDSENAERILFNMRPRELVDVMKNAYNQGLECDHGDDEGGDDGVSPKDVGHNIYILAHQLARHNKLLQQMLKPGSDPDEGDEALKYYANHTAQIEIVRHDRTMEQIVFPVPNICEYLTRESKCRVFNTTERDEQGSKVNDFFQQTEDLYNEMKWQKKIRNNPALFWFSRHIS

SEQ ID NO: 833 - protein, 286 aa, synthetic construct
  REGION 1..286: note = Description of Artificial Sequence: Syntheticpolypeptide
NNSTVSRTSASKYENMIRYTGSPDSLRSRTPMITPDLESGVKMWHLVKNHEHGDQKEGDRGSKMVSEIYLTRLLATKGTLQKFVDDLFETIFSTAHRGSALPLAIKYMFDFLDEQADKHGIHDPHVRHTWKSNCLPLRFWVNMIKNPQFVFDIHKNSITDACLSVVAQTFMDSCSTSEHRLGKDSPSNKLLYAKDIPSYKNWVERYYSDIGKMPAISDQDMNAYLAEQSRMHMNEFNTMSALSEIFSYVGKYSEEILGPLDHDDQCGKQKLAYKLEQVITLMSLDS

SEQ ID NO: 834 - protein, 298 aa, synthetic construct
  REGION 1..298: note = Description of Artificial Sequence: Syntheticpolypeptide
CETLQFLDIMCGSTTGGLGLLGLYINEDNVGLVIQTLETLTEYCQGPCHENQTCIVTHESNGIDIITALILNDISPLCKYRMDLVLQLKDNASKLLLALMESRHDSENAERILISLRPQELVDVIKKAYLQEEERENSEVSPREVGHNIYILALQLSRHNKQLQHLLKPVKRIQEEEAEGISSMLSLNNKQLSQMLKSSAPAQEEEEDPLAYYENHTSQIEIVRQDRSMEQIVFPVPGICQFLTEETKHRLFTTTEQDEQGSKVSDFFDQSSFLHNEMEWQRKLRSMPLIYWFSRRMT

SEQ ID NO: 835 - protein, 353 aa, synthetic construct
  REGION 1..353: note = Description of Artificial Sequence: Syntheticpolypeptide
PYSQRPKAEDMDLEWRQGRMTRIILQDEDVTTKIECDWKRLNSLAHYQVTDGSLVALVPKQVSAYNMANSFTFTRSLSRYESLLRTASSPDSLRSRAPMITPDQETGTKLWHLVKNHDHADHREGDRGSKMVSEIYLTRLLATKGTLQKFVDDLFETVFSTAHRGSALPLAIKYMFDFLDEQADQRQISDPDVRHTWKSNCLPLRFWVNVIKNPQFVFDIHKNSITDACLSVVAQTFMDSCSTSEHRLGKDSPSNKLLYAKDIPNYKSWVERYYRDIAKMASISDQDMDAYLVEQSRLHASDFSVLSALNELYFYVTKYRQEILTALDRDASCRKHKLRQKLEQIISLVSSDS

SEQ ID NO: 836 - protein, 610 aa, synthetic construct
  REGION 1..610: note = Description of Artificial Sequence: Syntheticpolypeptide
DLSNKINEMKTFNSPNLKDGRFVNPSGQPTPYATTQLIQSNLSNNMNNGSGDSGEKHWKPLGQQKQEVAPVQYNIVEQNKLNKDYRANDTVPPTIPYNQSYDQNTGGSYNSSDRGSSTSGSQGHKKGARTPKVPKQGGMNWADLLPPPPAHPPPHSNSEEYNISVDESYDQEMPCPVPPARMYLQQDELEEEEDERGPTPPVRGAASSPAAVSYSHQSTATLTPSPQEELQPMLQDCPEETGHMQHQPDRRRQPVSPPPPPRPISPPHTYGYISGPLVSDMDTDAPEEEEDEADMEVAKMQTRRLLLRGLEQTPASSVGDLESSVTGSMINGWGSASEEDNISSGRSSVSSSDGSFFTDADFAQAVAAAAEYAGLKVARRQMQDAAGRRHFHASQCPRPTSPVSTDSNMSAAVMQKTRPAKKLKHQPGHLRRETYTDDLPPPPVPPPAIKSPTAQSKTQLEVRPVVVPKLPSMDARTDRSSDRKGSSYKGREVLDGRQVVDMRTNPGDPREAQEQQNDGKGRGNKAAKRDLPPAKTHLIQEDILPYCRPTFPTSNNPRDPSSSSSMSSRGSGSRQREQANVGRRNIAEMQVLGGYERGEDNNEELEETES

SEQ ID NO: 837 - protein, 4 aa, synthetic construct
  REGION 1..4: note = Description of Artificial Sequence: Syntheticpeptide
KIHK

SEQ ID NO: 838 - protein, 4 aa, synthetic construct
  REGION 1..4: note = Description of Artificial Sequence: Syntheticpeptide
KTSK

SEQ ID NO: 839 - protein, 4 aa, synthetic construct
  REGION 1..4: note = Description of Artificial Sequence: Syntheticpeptide
KIHR

SEQ ID NO: 840 - protein, 4 aa, synthetic construct
  REGION 1..4: note = Description of Artificial Sequence: Syntheticpeptide
CVRS

SEQ ID NO: 841 - protein, 4 aa, synthetic construct
  REGION 1..4: note = Description of Artificial Sequence: Syntheticpeptide
QYSK

SEQ ID NO: 842 - protein, 5 aa, synthetic construct
  REGION 1..5: note = Description of Artificial Sequence: Syntheticpeptide
HYTQQ

SEQ ID NO: 843 - protein, 7 aa, synthetic construct
  REGION 1..7: note = Description of Artificial Sequence: Syntheticpeptide
LGPKPQG

SEQ ID NO: 844 - protein, 7 aa, synthetic construct
  REGION 1..7: note = Description of Artificial Sequence: Syntheticpeptide
LFEENKL

SEQ ID NO: 845 - protein, 8 aa, synthetic construct
  REGION 1..8: note = Description of Artificial Sequence: Syntheticpeptide
VKADTYCA

SEQ ID NO: 846 - protein, 8 aa, synthetic construct
  REGION 1..8: note = Description of Artificial Sequence: Syntheticpeptide
QTSEPSGT

SEQ ID NO: 847 - protein, 10 aa, synthetic construct
  REGION 1..10: note = Description of Artificial Sequence: Syntheticpeptide
QSCALPTDAL

SEQ ID NO: 848 - protein, 10 aa, synthetic construct
  REGION 1..10: note = Description of Artificial Sequence: Syntheticpeptide
AKNALLRWRV

SEQ ID NO: 849 - protein, 10 aa, synthetic construct
  REGION 1..10: note = Description of Artificial Sequence: Syntheticpeptide
SKNRLLSIKT

SEQ ID NO: 850 - protein, 12 aa, synthetic construct
  REGION 1..12: note = Description of Artificial Sequence: Syntheticpeptide
QHIPAQQQDHPE

SEQ ID NO: 851 - protein, 14 aa, synthetic construct
  REGION 1..14: note = Description of Artificial Sequence: Syntheticpeptide
AHHRFYTKRLTFWT

SEQ ID NO: 852 - protein, 14 aa, synthetic construct
  REGION 1..14: note = Description of Artificial Sequence: Syntheticpeptide
AHHRFYAKRMTLWT

SEQ ID NO: 853 - protein, 14 aa, synthetic construct
  REGION 1..14: note = Description of Artificial Sequence: Syntheticpeptide
KHRHWYPFNFVIEQ

SEQ ID NO: 854 - protein, 15 aa, synthetic construct
  REGION 1..15: note = Description of Artificial Sequence: Syntheticpeptide
AHHRFYAERLAGWPC

SEQ ID NO: 855 - protein, 15 aa, synthetic construct
  REGION 1..15: note = Description of Artificial Sequence: Syntheticpeptide
KAENIIMMETAQTSL

SEQ ID NO: 856 - protein, 16 aa, synthetic construct
  REGION 1..16: note = Description of Artificial Sequence: Syntheticpeptide
YVISEEKDECVIATEV

SEQ ID NO: 857 - protein, 22 aa, synthetic construct
  REGION 1..22: note = Description of Artificial Sequence: Syntheticpeptide
RKAVPDAVESRYSRTEGSLDGT

SEQ ID NO: 858 - protein, 27 aa, synthetic construct
  REGION 1..27: note = Description of Artificial Sequence: Syntheticpeptide
KIHTGQPLRGPGFGLQLEREMSGMVPK

SEQ ID NO: 859 - protein, 30 aa, synthetic construct
  REGION 1..30: note = Description of Artificial Sequence: Syntheticpolypeptide
IYAGFDTKIMKNCGKIHLKRTKLDLLMNKL

SEQ ID NO: 860 - protein, 31 aa, synthetic construct
  REGION 1..31: note = Description of Artificial Sequence: Syntheticpolypeptide
ASALKSHRTRGHGRGDCCGRSLGDSCCFSAK

SEQ ID NO: 861 - protein, 36 aa, synthetic construct
  REGION 1..36: note = Description of Artificial Sequence: Syntheticpolypeptide
FTLVLEEIRQGFFTDEDTHLVKKFTLYVGDNWNKCD

SEQ ID NO: 862 - protein, 37 aa, synthetic construct; identical to SEQ ID NO: 817
  REGION 1..37: note = Description of Artificial Sequence: Syntheticpolypeptide

SEQ ID NO: 863 - protein, 44 aa, synthetic construct
  REGION 1..44: note = Description of Artificial Sequence: Syntheticpolypeptide
PSEDFERTPQSPTLPPAKVAAPNLSRMGAIPVMIPAQSKDGSIV

SEQ ID NO: 864 - protein, 46 aa, synthetic construct
  REGION 1..46: note = Description of Artificial Sequence: Syntheticpolypeptide
LPEDGGPYTNSILFDSDDNIKWVCQDMGLGDSQDFRDYMESLQDQM

SEQ ID NO: 865 - protein, 48 aa, synthetic construct; identical to SEQ ID NO: 818
  REGION 1..48: note = Description of Artificial Sequence: Syntheticpolypeptide

SEQ ID NO: 866 - protein, 52 aa, synthetic construct
  REGION 1..52: note = Description of Artificial Sequence: Syntheticpolypeptide
SYHASGHSVAYKPGGFKASTGFGSNTKNKKIYDGGARTEDEVQSYPSKHDYV

SEQ ID NO: 867 - protein, 52 aa, synthetic construct
  REGION 1..52: note = Description of Artificial Sequence: Syntheticpolypeptide
QVGPGAAARWDLCIDQAVVFIEDAIQYRSINHRVDASSMWLYRRYYSNVCQR

SEQ ID NO: 868 - protein, 57 aa, synthetic construct
  REGION 1..57: note = Description of Artificial Sequence: Syntheticpolypeptide
EGPRKGHLEEEEEDGEEGAETLAHFCPMELRGPEPLGSRPRQPNLIPWAAAGRRAAP

SEQ ID NO: 869 - protein, 51 aa, synthetic construct
  REGION 1..51: note = Description of Artificial Sequence: Syntheticpolypeptide
QKPGPLQKKLDSFPAQDPCTTIYVAATEPVPESVQETNSITVYASVTLPES

SEQ ID NO: 870 - protein, 60 aa, synthetic construct; identical to SEQ ID NO: 819
  REGION 1..60: note = Description of Artificial Sequence: Syntheticpolypeptide

SEQ ID NO: 871 - protein, 61 aa, synthetic construct
  REGION 1..61: note = Description of Artificial Sequence: Syntheticpolypeptide
DPFEMAAYLKDGYRIAQPINCPDELFAVMACCWALDPEERPKFQQLVQCLTEFHAALGAYV

SEQ ID NO: 872 - protein, 43 aa, synthetic construct
  REGION 1..43: note = Description of Artificial Sequence: Syntheticpolypeptide
THSNRETEIWTPRENDTITIYSTINHSKESKPTFSRATALDNV

SEQ ID NO: 873 - protein, 70 aa, synthetic construct; identical to SEQ ID NO: 820
  REGION 1..70: note = Description of Artificial Sequence: Syntheticpolypeptide

SEQ ID NO: 874 - protein, 75 aa, synthetic construct
  REGION 1..75: note = Description of Artificial Sequence: Syntheticpolypeptide
PPSHHQLTLPDPSHHGLHSTPDSPAKPEKNGHAKDHPKIAKIFEIQTMPNGKTRTSLKTMSRRKLSQQKEKKATQ

SEQ ID NO: 875 - protein, 75 aa, synthetic construct; identical to SEQ ID NO: 821
  REGION 1..75: note = Description of Artificial Sequence: Syntheticpolypeptide

SEQ ID NO: 876 - protein, 49 aa, synthetic construct
  REGION 1..49: note = Description of Artificial Sequence: Syntheticpolypeptide
FNLQGKTPVSQKEESSATIYCSIRKPQVVPPPQQNDLEIPESPTYENFT

SEQ ID NO: 877 - protein, 76 aa, synthetic construct; identical to SEQ ID NO: 822
  REGION 1..76: note = Description of Artificial Sequence: Syntheticpolypeptide

SEQ ID NO: 878 - protein, 48 aa, synthetic construct
  REGION 1..48: note = Description of Artificial Sequence: Syntheticpolypeptide
PHTNRTILKEDPANTVYSTVEIPKKMENPHSLLTMPDTPRLFAYENVI

SEQ ID NO: 879 - protein, 79 aa, synthetic construct; identical to SEQ ID NO: 823
  REGION 1..79: note = Description of Artificial Sequence: Syntheticpolypeptide

SEQ ID NO: 880 - protein, 83 aa, synthetic construct; identical to SEQ ID NO: 824
  REGION 1..83: note = Description of Artificial Sequence: Syntheticpolypeptide

SEQ ID NO: 881 - protein, 86 aa, synthetic construct
  REGION 1..86: note = Description of Artificial Sequence: Syntheticpolypeptide
ANLTASDVMNRVNLGYLQDEMNDHQNTLSYVLINPPPDTRLEPSDIVYLIRSDPLAHVASSSQSRKSSCSHKLSSCNPETRDETQL

SEQ ID NO: 882 - protein, 63 aa, synthetic construct [sequence omitted]

SEQ ID NO: 883 - protein, 92 aa, synthetic construct
  REGION 1..92: note = Description of Artificial Sequence: Syntheticpolypeptide
ENVPPLRWKEFVRRLGLSDHEIDRLELQNGRCLREAQYSMLATWRRRTPRREATLELLGRVLRDMDLLGCLEDIEEALCGPAALPPAPSLLR

SEQ ID NO: 884 - protein, 95 aa, synthetic construct
  REGION 1..95: note = Description of Artificial Sequence: Syntheticpolypeptide
LIGDFLRACFVRFCNYCWCWDLEYGYPSYTEFDISGNVLALIFNQGMIWMGSFFAPSLPGINILRLHTSMYFQCWAVMCCNVPEARVFKASRSNN

SEQ ID NO: 885 - protein, 105 aa, synthetic construct
  REGION 1..105: note = Description of Artificial Sequence: Syntheticpolypeptide
ESTESQILVGIVQRAQLVQALQAEPPSRAPGHQQCLQDILARGCPTEPVTLTLFSETTLHQAQNLFKLLNLQSLFVTSRGRAVGCVSWVEMKKAISNLTNPPAPK

SEQ ID NO: 886 - protein, 108 aa, synthetic construct
  REGION 1..108: note = Description of Artificial Sequence: Syntheticpolypeptide
AKTIKDVFHNHGIHATTIQPEFASVGSKSSVVPCELACRTQCALKQCCGTLPQAPSGKDAEKTPAVSISCLELSNNLEKKPRRTKAENIPAVVIEIKNMPNKQPESSL

SEQ ID NO: 887 - protein, 113 aa, synthetic construct
  REGION 1..113: note = Description of Artificial Sequence: Syntheticpolypeptide
TPSSPLATLLQHENPSHFELVVFLSAMQEGTGEICQRRTSYLPSEIMLHHCFASLLTRGSKGEYQIKMENFDKTVPEFPTPLVSKSPNRTDLDIHINGQSIDNFQISETGLTE

SEQ ID NO: 888 - protein, 113 aa, synthetic construct
  REGION 1..113: note = Description of Artificial Sequence: Syntheticpolypeptide
GGRTMLPIRWMPPESILYRKFTTESDVWSFGVVLWEIFTYGKQPWYQLSNTEAIDCITQGRELERPRACPPEVYAIMRGCWQREPQQRHSIKDVHARLQALAQAPPVYLDVLG

SEQ ID NO: 889 - protein, 113 aa, synthetic construct
  REGION 1..113: note = Description of Artificial Sequence: Syntheticpolypeptide
GGHTMLPIRWMPPESIMYRKFTTESDVWSLGVVLWEIFTYGKQPWYQLSNNEVIECITQGRVLQRPRTCPQEVYELMLGCWQREPHMRKNIKGIHTLLQNLAKASPVYLDILG

SEQ ID NO: 890 - protein, 118 aa, synthetic construct
  REGION 1..118: note = Description of Artificial Sequence: Syntheticpolypeptide
LNPPPSPATDPSLYNMDMFYSSNIPATARPYRPYIIRGMAPPTTPCSTDVCDSDYSASRWKASKYYLDLNSDSDPYPPPPTPHSQYLSAEDSCPPSPATERSYFHLFPPPPSPCTDSS

SEQ ID NO: 891 - protein, 119 aa, synthetic construct
  REGION 1..119: note = Description of Artificial Sequence: Syntheticpolypeptide
DHNSPFFHMAAETLLQQDFELVVFLDGTVESTSATCQVRTSYVPEEVLWGYRFAPIVSKTKEGKYRVDFHNFSKTVEVETPHCAMCLYNEKDVRARMKRGYDNPNFILSEVNETDDTKM

SEQ ID NO: 892 - protein, 120 aa, synthetic construct
  REGION 1..120: note = Description of Artificial Sequence: Syntheticpolypeptide
DETSPLKDLPLRSGEGDFELVLILSGTVESTSATCQVRTSYLPEEILWGYEFTPAISLSASGKYIADFSLFDQVVKVASPSGLRDSTVRYGDPEKLKLEESLREQAEKEGSALSVRISNV

SEQ ID NO: 893 - protein, 136 aa, synthetic construct; identical to SEQ ID NO: 825
  REGION 1..136: note = Description of Artificial Sequence: Syntheticpolypeptide

SEQ ID NO: 894 - protein, 151 aa, synthetic construct; identical to SEQ ID NO: 827
  REGION 1..151: note = Description of Artificial Sequence: Syntheticpolypeptide

SEQ ID NO: 895 - protein, 154 aa, synthetic construct
  REGION 1..154: note = Description of Artificial Sequence: Syntheticpolypeptide
ENAEIYNYLIGGNRLKQPPECMEDVYDLMYQCWSADPKQRPSFTCLRMELENILGQLSVLSASQDPLYINIERAEEPTAGGSLELPGRDQPYSGAGDGSGMGAVGGTPSDCRYILTPGGLAEQPGQAEHQPESPLNETQRLLLLQQGLLPHSSC

SEQ ID NO: 896 - protein, 172 aa, synthetic construct; identical to SEQ ID NO: 828
  REGION 1..172: note = Description of Artificial Sequence: Syntheticpolypeptide

SEQ ID NO: 897 - protein, 180 aa, synthetic construct; identical to SEQ ID NO: 829
  REGION 1..180: note = Description of Artificial Sequence: Syntheticpolypeptide

SEQ ID NO: 898 - protein, 195 aa, synthetic construct; identical to SEQ ID NO: 830
  REGION 1..195: note = Description of Artificial Sequence: Syntheticpolypeptide

SEQ ID NO: 899 - protein, 205 aa, synthetic construct
  REGION 1..205: note = Description of Artificial Sequence: Syntheticpolypeptide
PDPYKSSILSLIKFKENPHLIIMNVSDCIPDAIEVVSKPEGTKIQFLGTRKSLTETELTKPNYLYLLPTEKNHSGPGPCICFENLTYNQAASDSGSCGHVPVSPKAPSMLGLMTSPENVLKALEKNYMNSLGEIPAGETSLNYVSQLASPMFGDKDSLPTNPVEAPHCSEYKMQMAVSLRLALPPPTENSSLSSITLLDPGEHYC

SEQ ID NO: 900 - protein, 224 aa, synthetic construct
  REGION 1..224: note = Description of Artificial Sequence: Syntheticpolypeptide
PNPENCKALQFQKSVCEGSSALKTLEMNPCTPNNVEVLETRSAFPKIEDTEIISPVAERPEDRSDAEPENHVVVSYCPPIIEEEIPNPAADEAGGTAQVIYIDVQSMYQPQAKPEEEQENDPVGGAGYKPQMHLPINSTVEDIAAEEDLDKTAGYRPQANVNTWNLVSPDSPRSIDSNSEIVSFGSPCSINSRQFLIPPKDEDSPKSNGGGWSFTNFFQNKPND

SEQ ID NO: 901 - protein, 230 aa, synthetic construct
  REGION 1..230: note = Description of Artificial Sequence: Syntheticpolypeptide
RDVKKGNLPPDYRISLIDIGLVIEYLMGGAYRCNYTRKRFRTLYHNLFGPKRPKALKLLGMEDDIPLRRGRKTTKKREEEVDIDLDDPEINHFPFPFHELMVWAVLMKRQKMALFFWQHGEEAMAKALVACKLCKAMAHEASENDMVDDISQELNHNSRDFGQLAVELLDQSYKQDEQLAMKLLTYELKNWSNATCLQLAVAAKHRDFIAHTCSQMLLTDMWMGRLRMRK

SEQ ID NO: 902 - protein, 96 aa, synthetic construct
  REGION 1..96: note = Description of Artificial Sequence: Syntheticpolypeptide
KDLKTRRNHEQEQTFPGGGSTIYSMIQSQSSAPTSQEPAYTLYSLIQPSRKSGSRKRNHSPSFNSTIYEVIGKSQPKAQNPARLSRKELENFDVYS

SEQ ID NO: 903 - protein, 266 aa, synthetic construct
  REGION 1..266: note = Description of Artificial Sequence: Syntheticpolypeptide
GNANAAKPDLDKVISLKEANVKLRANALIKRGSMYMQQQQPLLSTQDFNMAADIDPQNADVYHHRGQLKILLDQVEEAVADFDECIRLRPESALAQAQKCFALYRQAYTGNNSSQIQAAMKGFEEVIKKFPRCAEGYALYAQALTDQQQFGKADEMYDKCIDLEPDNATTYVHKGLLQLQWKQDLDRGLELISKAIEIDNKCDFAYETMGTIEVQRGNMEKAIDMFNKAINLAKSEMEMAHLYSLCDAAHAQTEVAKKYGLKPPTL

SEQ ID NO: 904 - protein, 267 aa, synthetic construct
  REGION 1..267: note = Description of Artificial Sequence: Syntheticpolypeptide
ENEAPWVTDKRPPPDWPSKGKIQFNNYQVRYRPELDLVLRGITCDIGSMEKIGVVGRTGAGKSSLTNCLFRILEAAGGQIIIDGVDIASIGLHDLREKLTIIPQDPILFSGSLRMNLDPFNNYSDEEIWKALELAHLKSFVASLQLGLSHEVTEAGGNLSIGQRQLLCLGRALLRKSKILVLDEATAAVDLETDNLIQTTIQNEFAHCTVITIAHRLHTIMDSDKVMVLDNGKIIECGSPEELLQIPGPFYFMAKEAGIENVNSTKF

SEQ ID NO: 905 - protein, 274 aa, synthetic construct; identical to SEQ ID NO: 831
  REGION 1..274: note = Description of Artificial Sequence: Syntheticpolypeptide

SEQ ID NO: 906 - protein, 275 aa, synthetic construct; identical to SEQ ID NO: 832
  REGION 1..275: note = Description of Artificial Sequence: Syntheticpolypeptide

SEQ ID NO: 907 - protein, 286 aa, synthetic construct; identical to SEQ ID NO: 833
  REGION 1..286: note = Description of Artificial Sequence: Syntheticpolypeptide

SEQ ID NO: 908 - protein, 298 aa, synthetic construct; identical to SEQ ID NO: 834
  REGION 1..298: note = Description of Artificial Sequence: Syntheticpolypeptide

SEQ ID NO: 909 - protein, 323 aa, synthetic construct
  REGION 1..323: note = Description of Artificial Sequence: Syntheticpolypeptide
LADGSFVRCTPSENSDLFYAVPWSCGTLGFLVAAEIRIIPAKKYVKLRFEPVRGLEAICAKFTHESQRQENHFVEGLLYSLDEAVIMTGVMTDEAEPSKLNSIGNYYKPWFFKHVENYLKTNREGLEYIPLRHYYHRHTRSIFWELQDIIPFGNNPIFRYLFGWMVPPKISLLKLTQGETLRKLYEQHHVVQDMLVPMKCLQQALHTFQNDIHVYPIWLCPFILPSQPGLVHPKGNEAELYIDIGAYGEPRVKHFEARSCMRQLEKFVRSVHGFQMLYADCYMNREEFWEMFDGSLYHKLREKLGCQDAFPEVYDKICKAARH

SEQ ID NO: 910 - protein, 341 aa, synthetic construct
  REGION 1..341: note = Description of Artificial Sequence: Syntheticpolypeptide
NPEYFSASDMYVPDEWEVPREQISIIRELGQGSFGMVYEGLARGLEAGEESTPVALKTVNELASPRECIEFLKEASVMKAFKCHHVVRLLGVVSQGQPTLVIMELMTRGDLKSHLRSLRPEAENNPGLPQPALGEMIQMAGEIADGMAYLAANKFVHRDLAARNCMVSQDFTVKIGDFGMTRDVYETDYYRKGGKGLLPVRWMAPESLKDGIFTTHSDVWSFGVVLWEIVTLAEQPYQGLSNEQVLKFVMDGGVLEELEGCPLQLQELMSRCWQPNPRLRPSFTHILDSIQEELRPSFRLLSFYYSPECRGARGSLPTTDAEPDSSPTPRDCSPQNGGPGH

SEQ ID NO: 911 - protein, 351 aa, synthetic construct
  REGION 1..351: note = Description of Artificial Sequence: Syntheticpolypeptide
PAPSALTPKILDLLVHAISINSAYTTKILPPEKEGALPRQVGNKTECALLGFVLDLKRDFQPVREQIPEDKLYKVYTFNSVRKSMSTVIRMPDGGFRLFSKGASEILLKKCTNILNSNGELRGFRPRDRDDMVRKIIEPMACDGLRTICIAYRDFSAGQEPDWDNENEVVGDLTCIAVVGIEDPVRPEVPEAIRKCQRAGITVRMVTGDNINTARAIAAKCGIIQPGEDFLCLEGKEFNRRIRNEKGEIEQERLDKVWPKLRVLARSSPTDKHTLVKGIIDSTTGEQRQVVAVTGDGTNDGPALKKADVGFAMGIAGTDVAKEASDIILTDDNFTSIVKAVMWGRNVYDSI

SEQ ID NO: 912 - protein, 351 aa, synthetic construct
  REGION 1..351: note = Description of Artificial Sequence: Syntheticpolypeptide
GGDQLNCHFGSILHTTGLQYRDFIHVSFHDKVYELPFLVALDHRKESVVVAVRGTMSLQDVLTDLSAESEVLDVECEVQDRLAHKGISQAARYVYQRLINDGILSQAFSIAPEYRLVIVGHSLGGGAAALLATMLRAAYPQVRCYAFSPPRGLWSKALQEYSQSFIVSLVLGKDVIPRLSVTNLEDLKRRILRVVAHCNKPKYKILLHGLWYELFGGNPNNLPTELDGGDQEVLTQPLLGEQSLLTRWSPAYSFSSDSPLDSSPKYPPLYPPGRIIHLQEEGASGRFGCCSAAHYSAKWSHEAEFSKILIGPKMLTDHMPDILMRALDSVVSDRAACVSCPAQGVSSVDVA

SEQ ID NO: 913 - protein, 353 aa, synthetic construct; identical to SEQ ID NO: 835
  REGION 1..353: note = Description of Artificial Sequence: Syntheticpolypeptide

SEQ ID NO: 914 - protein, 364 aa, synthetic construct
  REGION 1..364: note = Description of Artificial Sequence: Syntheticpolypeptide
KSDAAMTVAVKMLKPSAHLTEREALMSELKVLSYLGNHMNIVNLLGACTIGGPTLVITEYCCYGDLLNFLRRKRDSFICSKQEDHAEAALYKNLLHSKESSCSDSTNEYMDMKPGVSYVVPTKADKRRSVRIGSYIERDVTPAIMEDDELALDLEDLLSFSYQVAKGMAFLASKNCIHRDLAARNILLTHGRITKICDFGLARDIKNDSNYVVKGNARLPVKWMAPESIFNCVYTFESDVWSYGIFLWELFSLGSSPYPGMPVDSKFYKMIKEGFRMLSPEHAPAEMYDIMKTCWDADPLKRPTFKQIVQLIEKQISESTNHIYSNLANCSPNRQKPVVDHSVRINSVGSTASSSQPLLVHDDV

SEQ ID NO: 915 - protein, 435 aa, synthetic construct
  REGION 1..435: note = Description of Artificial Sequence: Syntheticpolypeptide
HVPKSYRRRRRHKRKTGHKEKKEKERISENYSDKSDIENADESSSSILKPLISPAAERIRFILGEEDDSPAPPQLFTELDELLAVDGQEMEWKETARWIKFEEKVEQGGERWSKPHVATLSLHSLFELRTCMEKGSIMLDREASSLPQLVEMIVDHQIETGLLKPELKDKVTYTLLRKHRHQTKKSNLRSLADIGKTVSSASRMFTNPDNGSPAMTHRNLTSSSLNDISDKPEKDQLKNKFMKKLPRDAEASNVLVGEVDFLDTPFIAFVRLQQAVMLGALTEVPVPTRFLFILLGPKGKAKSYHEIGRAIATLMSDEVFHDIAYKAKDRHDLIAGIDEFLDEVIVLPPGEWDPAIRIEPPKSLPSSDKRKNMYSGGENVQMNGDTPHDGGHGGGGHGDCEELQRTGRFCGGLIKDIKRKAPFFASDFYDALNIQ

SEQ ID NO: 916 - protein, 517 aa, synthetic construct
  REGION 1..517: note = Description of Artificial Sequence: Syntheticpolypeptide
WIPDGENVKIPVAIKVLRENTSPKANKEILDEAYVMAGVGSPYVSRLLGICLTSTVQLVTQLMPYGCLLDHVRENRGRLGSQDLLNWCMQIAKGMSYLEDVRLVHRDLAARNVLVKSPNHVKITDFGLARLLDIDETEYHADGGKVPIKWMALESILRRRFTHQSDVWSYGVTVWELMTFGAKPYDGIPAREIPDLLEKGERLPQPPICTIDVYMIMVKCWMIDSECRPRFRELVSEFSRMARDPQRFVVIQNEDLGPASPLDSTFYRSLLEDDDMGDLVDAEEYLVPQQGFFCPDPAPGAGGMVHHRHRSSSTRSGGGDLTLGLEPSEEEAPRSPLAPSEGAGSDVFDGDLGMGAAKGLQSLPTHDPSPLQRYSEDPTVPLPSETDGYVAPLTCSPQPEYVNQPDVRPQPPSPREGPLPAARPAGATLERPKTLSPGKNGVVKDVFAFGGAVENPEYLTPQGGAAPQPHPPPAFSPAFDNLYYWDQDPPERGAPPSTFKGTPTAENPEYLGLDVPV

SEQ ID NO: 917 - protein, 541 aa, synthetic construct
  REGION 1..541: note = Description of Artificial Sequence: Syntheticpolypeptide
IMDPDEVPLDEQCERLPYDASKWEFARERLKLGKSLGRGAFGKVVQASAFGIKKSPTCRTVAVKMLKEGATASEYKALMTELKILTHIGHHLNVVNLLGACTKQGGPLMVIVEYCKYGNLSNYLKSKRDLFFLNKDAALHMEPKKEKMEPGLEQGKKPRLDSVTSSESFASSGFQEDKSLSDVEEEEDSDGFYKEPITMEDLISYSFQVARGMEFLSSRKCIHRDLAARNILLSENNVVKICDFGLARDIYKNPDYVRKGDTRLPLKWMAPESIFDKIYSTKSDVWSYGVLLWEIFSLGGSPYPGVQMDEDFCSRLREGMRMRAPEYSTPEIYQIMLDCWHRDPKERPRFAELVEKLGDLLQANVQQDGKDYIPINAILTGNSGFTYSTPAFSEDFFKESISAPKFNSGSSDDVRYVNAFKFMSLERIKTFEELLPNATSMFDDYQGDSSTLLASPMLKRFTWTDSKPKASLKIDLRVTSKSKESGLSDVSRPSFCHSSCGHVSEGKRRFTYDHAELERKIACCSPPPDYNSVVLYSTPPI

SEQ ID NO: 918 - protein, 548 aa, synthetic construct
  REGION 1..548: note = Description of Artificial Sequence: Syntheticpolypeptide
IMDPGEVPLEEQCEYLSYDASQWEFPRERLHLGRVLGYGAFGKVVEASAFGIHKGSSCDTVAVKMLKEGATASEHRALMSELKILIHIGNHLNVVNLLGACTKPQGPLMVIVEFCKYGNLSNFLRAKRDAFSPCAEKSPEQRGRFRAMVELARLDRRRPGSSDRVLFARFSKTEGGARRASPDQEAEDLWLSPLTMEDLVCYSFQVARGMEFLASRKCIHRDLAARNILLSESDVVKICDFGLARDIYKDPDYVRKGSARLPLKWMAPESIFDKVYTTQSDVWSFGVLLWEIFSLGASPYPGVQINEEFCQRLRDGTRMRAPELATPAIRRIMLNCWSGDPKARPAFSELVEILGDLLQGRGLQEEEEVCMAPRSSQSSEEGSFSQVSTMALHIAQADAEDSPPSLQRHSLAARYYNWVSFPGCLARGAETRGSSRMKTFEEFPMTPTTYKGSVDNQTDSGMVLASEEFEQIESRHRQESGFSCKGPGQNVAVTRAHPDSQGRRRRPERGARGGQVFYNSEYGELSEPSEEDHCSPSARVTFFTDNSY

SEQ ID NO: 919 - protein, 552 aa, synthetic construct
  REGION 1..552: note = Description of Artificial Sequence: Syntheticpolypeptide
VMDPDELPLDEHCERLPYDASKWEFPRDRLKLGKPLGRGAFGQVIEADAFGIDKTATCRTVAVKMLKEGATHSEHRALMSELKILIHIGHHLNVVNLLGACTKPGGPLMVIVEFCKFGNLSTYLRSKRNEFVPYKTKGARFRQGKDYVGAIPVDLKRRLDSITSSQSSASSGFVEEKSLSDVEEEEAPEDLYKDFLTLEHLICYSFQVAKGMEFLASRKCIHRDLAARNILLSEKNVVKICDFGLARDIYKDPDYVRKGDARLPLKWMAPETIFDRVYTIQSDVWSFGVLLWEIFSLGASPYPGVKIDEEFCRRLKEGTRMRAPDYTTPEMYQTMLDCWHGEPSQRPTFSELVEHLGNLLQANAQQDGKDYIVLPISETLSMEEDSGLSLPTSPVSCMEEEEVCDPKFHYDNTAGISQYLQNSKRKSRPVSVKTFEDIPLEEPEVKVIPDDNQTDSGMVLASEELKTLEDRTKLSPSFGGMVPSKSRESVASEGSNQTSGYQSGYHSDDTDTTVYSSEEAELLKLIEIGVQTGSTAQILQPDSGTTLSSPPV

SEQ ID NO: 920 - protein, 410 aa, synthetic construct
  REGION 1..410: note = Description of Artificial Sequence: Syntheticpolypeptide
FEPTVERGELVVRYRVRKSYSRRTTEATLNSLGISEELKEKLRDVMVDRHKVALGKTLGEGEFGAVMEGQLNQDDSILKVAVKTMKIAICTRSELEDFLSEAVCMKEFDHPNVMRLIGVCFQGSERESFPAPVVILPFMKHGDLHSFLLYSRLGDQPVYLPTQMLVKFMADIASGMEYLSTKRFIHRDLAARNCMLNENMSVCVADFGLSKKIYNGDYYRQGRIAKMPVKWIAIESLADRVYTSKSDVWSFGVTMWEIATRGQTPYPGVENSEIYDYLRQGNRLKQPADCLDGLYALMSRCWELNPQDRPSFTELREDLENTLKALPPAQEPDEILYVNMDEGGGYPEPPGAAGGADPPTQPDPKDSCSCLTAAEVHPAGRYVLCPSTTPSPAQPADRGSPAAPGQEDGA

SEQ ID NO: 921 - protein, 572 aa, synthetic construct
  REGION 1..572: note = Description of Artificial Sequence: Syntheticpolypeptide
WVPEGETVKIPVAIKILNETTGPKANVEFMDEALIMASMDHPHLVRLLGVCLSPTIQLVTQLMPHGCLLEYVHEHKDNIGSQLLLNWCVQIAKGMMYLEERRLVHRDLAARNVLVKSPNHVKITDFGLARLLEGDEKEYNADGGKMPIKWMALECIHYRKFTHQSDVWSYGVTIWELMTFGGKPYDGIPTREIPDLLEKGERLPQPPICTIDVYMVMVKCWMIDADSRPKFKELAAEFSRMARDPQRYLVIQGDDRMKLPSPNDSKFFQNLLDEEDLEDMMDAEEYLVPQAFNIPPPIYTSRARIDSNRSEIGHSPPPAYTPMSGNQFVYRDGGFAAEQGVSVPYRAPTSTIPEAPVAQGATAEIFDDSCCNGTLRKPVAPHVQEDSSTQRYSADPTVFAPERSPRGELDEEGYMTPMRDKPKQEYLNPVEENPFVSRRKNGDLQALDNPEYHNASNGPPKAEDEYVNEPLYLNTFANTLGKAEYLKNNILSMPEKAKKAFDNPDYWNHSLPPRSTLQHPDYLQEYSTKYFYKQNGRIRPIVAENPEYLSEFSLKPGTVLPPPPYRHRNTVV

SEQ ID NO: 922 - protein, 610 aa, synthetic construct; identical to SEQ ID NO: 836
  REGION 1..610: note = Description of Artificial Sequence: Syntheticpolypeptide

SEQ ID NO: 923 - protein, 651 aa, synthetic construct
  REGION 1..651: note = Description of Artificial Sequence: Syntheticpolypeptide
EPQDGCHPGDSVERSVTCLPSASDENENQLDGDGHEHLTSSDSAMGKPQVSEQDSLNNNESCTLSCEVAAGENLQNTLCEASRDEQAFLGKDKKIPGKRSPRSKKGTAKKIPPGLFSGDIAPLMQEKVLSAVTYAVDDEEAAEVNANEQPEAPKLVLQSLFSLIRGEVEQLDSRALPLCLHQIAESYFQEEDYEKAMKFIQLERLYHEQLLANLSAIQEQWETKWKTVQPHTVTALRNSEKGFNGEDFERLTKICATHQDPLLSKHKIAAVEKSQERKCSTQLLVSEDPKEGGATTKESESKTCLGTESSKESQHTVEPLGSSPCCHQMDVQTDSPSLSVTAGKDHMEELLCSAEATLALHTQSSETAGSPSGPDSSEDACEDDSRLQLAQTEACQDVARIEGIAEDPKVFLSSKSKTEPLISPGCDRIPPALISEGKYSQAQRKELRLPLRDASEALPTDQLENNELNELQQPDLTDSDGKSPQAQADSDGSENVLCGNNQISDLGILLPEVCMAPEEKGDKDDQLNKETEDYLNSLLEGCLKDTEDSLSYEDNQDDDSDLLQDLSPEEASYSLQENLPSDESCLSLDDLAKRIEIAEVVPTEGLVSILKKRNDTVGDHPAQMQHKPSKRRVRFQEIDDSLDQDEVGGGS

SEQ ID NO: 924 - protein, 766 aa, synthetic construct
  REGION 1..766: note = Description of Artificial Sequence: Syntheticpolypeptide
SKNIPTTKDVEPLLEIDGDIRNFEVFLSSRTPVLVARDVKVFLPCTVNLDPKLREIIADVRAAREQISIGGLAYPPLPLHEGPPRAPSGYSQPPSVCSSTSFNGPFAGGVVSPQPHSSYYSGMTGPQHPFYNRPFFAPYLYTPRYYPGGSQHLISRPSVKTSLPRDQNNGLEVIKEDAAEGLSSPTDSSRGSGPAPGPVVLLNSLNVDAVCEKLKQIEGLDQSMLPQYCTTIKKANINGRVLAQCNIDELKKEMNMNFGDWHLFRSTVLEMRNAESHVVPEDPRFLSESSSGPAPHGEPARRASHNELPHTELSSQTPYTLNFSFEELNTLGLDEGAPRHSNLSWQSQTRRTPSLSSLNSQDSSIEISKLTDKVQAEYRDAYREYIAQMSQLEGGPGSTTISGRSSPHSTYYMGQSSSGGSIHSNLEQEKGKDSEPKPDDGRKSFLMKRGDVIDYSSSGVSTNDASPLDPITEEDEKSDQSGSKLLPGKKSSERSSLFQTDLKLKGSGLRYQKLPSDEDESGTEESDNTPLLKDDKDRKAEGKVERVPKSPEHSAEPIRTFIKAKEYLSDALLDKKDSSDSGVRSSESSPNHSLHNEVADDSQLEKANLIELEDDSHSGKRGIPHSLSGLQDPIIARMSICSEDKKSPSECSLIASSPEENWPACQKAYNLNRTPSTVTLNNNSAPANRANQNFDEMEGIRETSQVILRPSSSPNPTTIQNENLKSMTHKRSQRSSYTRLSKDPPELHAAASSESTGFGEERESIL

SEQ ID NO: 925 - protein, 1171 aa, synthetic construct
  REGION 1..1171: note = Description of Artificial Sequence: Syntheticpolypeptide
WSLGVTLWELFDNAAQPYSNLSNLDVLNQVIRERDTKLPKPQLEQPYSDRWYEVLQFCWLSPEKRPAAEDVHRLLTYLRLQSQRDSEVDFEQQWNALKPNTNSRDSSNNAAFPILDHFARDRLGREMEEVLTVTETSQGLSFEYVWEAAKHDHFDERSRGHLDEGLSYTSIFYPVEVFESSLSDPGPGKQDDSGQDVPLRVPGVVPVFDAHNLSVGSDYYIQLEEKSGSNLELDYPPALLTTDMDNPERTGPELSQLTALRSVELEESSTDEDFFQSSTDPKDSSLPGDLHVTSGPESPFNNIFNDVDKSEDLPSHQKIFDLMELNGVQADFKPATLSSSLDNPKESVITGHFEKEKPRKIFDSEPLCLSDNLMHQDNFDPLNVQELSENFLFLQEKNLLKGSLSSKEHINDLQTELKNAGFTEAMLETSCRNSLDTELQFAENKPGLSLLQENVSTKGDDTDVMLTGDTLSTSLQSSPEVQVPPTSFETEETPRRVPPDSLPTQGETQPTCLDVIVPEDCLHQDISPDAVTVPVEILSTDARTHSLDNRSQDSPGESEETLRLTESDSVLADDILASRVSVGSSLPELGQELHNKPFSEDHHSHRRLEKNLEAVETLNQLNSKDAAKEAGLVSALSSDSTSQDSLLEDSLSAPFPASEPSLETPDSLESVDVHEALLDSLGSHTPQKLVPPDKPADSGYETENLESPEWTLHPAPEGTADSEPATTGDGGHSGLPPNPVIVISDAGDGHRGTEVTPETFTAGSQGSYRDSAYFSDNDSEPEKRSEEVPGTSPSALVLVQEQPLPEPVLPEQSPAAQDSCLEARKSQPDESCLSALHNSSDLELRATPEPAQTGVPQQVHPTEDEASSPWSVLNAELSSGDDFETQDDRPCTLASTGTNTNELLAYTNSALDKSLSSHSEGPKLKEPDIEGKYLGKLGVSGMLDLSEDGMDADEEDENSDDSDEDLRAFNLHSLSSESEDETEHPVPIILSNEDGRHLRSLLKPTAANAPDPLPEDWKKEKKAVTFFDDVTVYLFDQETPTKELGPCGGEACGPDLSGPAPASGSPYLSRCINSESSTDEEGGGFEWDDDFSPDPFMSKTTSNLLSSKPSLQTSKYFSPPPPARSTEQSWPHSAPYSRFSISPANIASFSLTHLTDSDIEQGGSSEDGEKD

SEQ ID NO: 926 - protein, 6 aa, synthetic construct
  REGION 1..6: note = Description of Artificial Sequence: Syntheticpeptide
TAYELV

SEQ ID NO: 927 - protein, 6 aa, synthetic construct
  REGION 1..6: note = Description of Artificial Sequence: Syntheticpeptide
TAYGLI

SEQ ID NO: 928 - protein, 6 aa, synthetic construct
  REGION 1..6: note = Description of Artificial Sequence: Syntheticpeptide
TAYNAV

SEQ ID NO: 929 - protein, 6 aa, synthetic construct
  REGION 1..6: note = Description of Artificial Sequence: Syntheticpeptide
TCYGLV

SEQ ID NO: 930 - protein, 6 aa, synthetic construct
  REGION 1..6: note = Description of Artificial Sequence: Syntheticpeptide
TCYPDI

SEQ ID NO: 931 - protein, 6 aa, synthetic construct
  REGION 1..6: note = Description of Artificial Sequence: Syntheticpeptide
TDYASI

SEQ ID NO: 932 - protein, 6 aa, synthetic construct
  REGION 1..6: note = Description of Artificial Sequence: Syntheticpeptide
TDYDLV

SEQ ID NO: 933 - protein, 6 aa, synthetic construct
  REGION 1..6: note = Description of Artificial Sequence: Syntheticpeptide
TDYLSI

SEQ ID NO: 934 - protein, 6 aa, synthetic construct
  REGION 1..6: note = Description of Artificial Sequence: Syntheticpeptide
TDYQQV

SEQ ID NO: 935 - protein, 6 aa, synthetic construct
  REGION 1..6: note = Description of Artificial Sequence: Syntheticpeptide
TDYYRV

SEQ ID NO: 936 - protein, 6 aa, synthetic construct
  REGION 1..6: note = Description of Artificial Sequence: Syntheticpeptide
TEYASI

SEQ ID NO: 937 - protein, 6 aa, synthetic construct
  REGION 1..6: note = Description of Artificial Sequence: Syntheticpeptide
TEYATI

SEQ ID NO: 938 - protein, 6 aa, synthetic construct
  REGION 1..6: note = Description of Artificial Sequence: Syntheticpeptide
TEYDTI

SEQ ID NO: 939 - protein, 6 aa, synthetic construct
  REGION 1..6: note = Description of Artificial Sequence: Syntheticpeptide
TEYPLV

SEQ ID NO: 940 - protein, 6 aa, synthetic construct
  REGION 1..6: note = Description of Artificial Sequence: Syntheticpeptide
TEYSEI

SEQ ID NO: 941 - protein, 6 aa, synthetic construct
  REGION 1..6: note = Description of Artificial Sequence: Syntheticpeptide
TEYSEV

SEQ ID NO: 942 - protein, 6 aa, synthetic construct
  REGION 1..6: note = Description of Artificial Sequence: Syntheticpeptide
TEYSTI

SEQ ID NO: 943 - protein, 6 aa, synthetic construct
  REGION 1..6: note = Description of Artificial Sequence: Syntheticpeptide
TEYTKV

SEQ ID NO: 944 - protein, 6 aa, synthetic construct
  REGION 1..6: note = Description of Artificial Sequence: Syntheticpeptide
TFYHVV

SEQ ID NO: 945 - protein, 6 aa, synthetic construct
  REGION 1..6: note = Description of Artificial Sequence: Syntheticpeptide
TFYLLI

SEQ ID NO: 946 - protein, 6 aa, synthetic construct
  REGION 1..6: note = Description of Artificial Sequence: Syntheticpeptide
TFYNKI

SEQ ID NO: 947 - protein, 6 aa, synthetic construct
  REGION 1..6: note = Description of Artificial Sequence: Syntheticpeptide
TFYPDI

SEQ ID NO: 948 - protein, 6 aa, synthetic construct
  REGION 1..6: note = Description of Artificial Sequence: Syntheticpeptide
TGYEDV

SEQ ID NO: 949 - protein, 6 aa, synthetic construct
  REGION 1..6: note = Description of Artificial Sequence: Syntheticpeptide
TGYLSI

SEQ ID NO: 950 - protein, 6 aa, synthetic construct
  REGION 1..6: note = Description of Artificial Sequence: Syntheticpeptide
THYKEI

SEQ ID NO: 951 - protein, 6 aa, synthetic construct
  REGION 1..6: note = Description of Artificial Sequence: Syntheticpeptide
TIYAQV

SEQ ID NO: 952 - protein, 6 aa, synthetic construct
  REGION 1..6: note = Description of Artificial Sequence: Syntheticpeptide
TIYAVV

SEQ ID NO: 953 - protein, 6 aa, synthetic construct
  REGION 1..6: note = Description of Artificial Sequence: Syntheticpeptide
TIYCSI

SEQ ID NO: 954 - protein, 6 aa, synthetic construct
  REGION 1..6: note = Description of Artificial Sequence: Syntheticpeptide
TIYEDV

SEQ ID NO: 955 - protein, 6 aa, synthetic construct
  REGION 1..6: note = Description of Artificial Sequence: Syntheticpeptide
TIYERI

SEQ ID NO: 956 - protein, 6 aa, synthetic construct
  REGION 1..6: note = Description of Artificial Sequence: Syntheticpeptide
TIYEVI

SEQ ID NO: 957 - protein, 6 aa, synthetic construct
  REGION 1..6: note = Description of Artificial Sequence: Syntheticpeptide
TIYHVI

SEQ ID NO: 958 - protein, 6 aa, synthetic construct
  REGION 1..6: note = Description of Artificial Sequence: Syntheticpeptide
TIYIGV

SEQ ID NO: 959 - protein, 6 aa, synthetic construct
  REGION 1..6: note = Description of Artificial Sequence: Syntheticpeptide
TIYLKV

SEQ ID NO: 960 - protein, 6 aa, synthetic construct
  REGION 1..6: note = Description of Artificial Sequence: Syntheticpeptide
TIYSMI

SEQ ID NO: 961 - protein, 6 aa, synthetic construct
  REGION 1..6: note = Description of Artificial Sequence: Syntheticpeptide
TIYSTI

SEQ ID NO: 962 - protein, 6 aa, synthetic construct
  REGION 1..6: note = Description of Artificial Sequence: Syntheticpeptide
TIYTYI

SEQ ID NO: 963 - protein, 6 aa, synthetic construct
  REGION 1..6: note = Description of Artificial Sequence: Syntheticpeptide
TKYFHI

SEQ ID NO: 964 - protein, 6 aa, synthetic construct
  REGION 1..6: note = Description of Artificial Sequence: Syntheticpeptide
TKYMEI

SEQ ID NO: 965 - protein, 6 aa, synthetic construct
  REGION 1..6: note = Description of Artificial Sequence: Syntheticpeptide
TKYQSV

SEQ ID NO: 966 - protein, 6 aa, synthetic construct
  REGION 1..6: note = Description of Artificial Sequence: Syntheticpeptide
TKYSNI

SEQ ID NO: 967 - protein, 6 aa, synthetic construct
  REGION 1..6: note = Description of Artificial Sequence: Syntheticpeptide
TKYSTV

SEQ ID NO: 968 - protein, 6 aa, synthetic construct
  REGION 1..6: note = Description of Artificial Sequence: Syntheticpeptide
TLYASV

SEQ ID NO: 969 - protein, 6 aa, synthetic construct
  REGION 1..6: note = Description of Artificial Sequence: Syntheticpeptide
TLYAVV

SEQ ID NO: 970 - protein, 6 aa, synthetic construct
  REGION 1..6: note = Description of Artificial Sequence: Syntheticpeptide
TLYFWV

SEQ ID NO: 971 - protein, 6 aa, synthetic construct
  REGION 1..6: note = Description of Artificial Sequence: Syntheticpeptide
TLYHLV

SEQ ID NO: 972 - protein, 6 aa, synthetic construct
  REGION 1..6: note = Description of Artificial Sequence: Syntheticpeptide
TLYPMV

SEQ ID NO: 973 - protein, 6 aa, synthetic construct
  REGION 1..6: note = Description of Artificial Sequence: Syntheticpeptide
TLYPPI

SEQ ID NO: 974 - protein, 6 aa, synthetic construct
  REGION 1..6: note = Description of Artificial Sequence: Syntheticpeptide
TLYRDI

SEQ ID NO: 975 - protein, 6 aa, synthetic construct
  REGION 1..6: note = Description of Artificial Sequence: Syntheticpeptide
TLYRDV

SEQ ID NO: 976 - protein, 6 aa, synthetic construct
  REGION 1..6: note = Description of Artificial Sequence: Syntheticpeptide
TLYSKI

SEQ ID NO: 977 - protein, 6 aa, synthetic construct
  REGION 1..6: note = Description of Artificial Sequence: Syntheticpeptide
TLYSLI

SEQ ID NO: 978 - protein, 6 aa, synthetic construct
  REGION 1..6: note = Description of Artificial Sequence: Syntheticpeptide
TLYSPV

SEQ ID NO: 979 - protein, 6 aa, synthetic construct
  REGION 1..6: note = Description of Artificial Sequence: Syntheticpeptide
TMYAQV

SEQ ID NO: 980 - protein, 6 aa, synthetic construct
  REGION 1..6: note = Description of Artificial Sequence: Syntheticpeptide
TMYCQV

SEQ ID NO: 981 - protein, 6 aa, synthetic construct
  REGION 1..6: note = Description of Artificial Sequence: Syntheticpeptide
TNYKAV

SEQ ID NO: 982 - protein, 6 aa, synthetic construct
  REGION 1..6: note = Description of Artificial Sequence: Syntheticpeptide
TNYNLV

SEQ ID NO: 983 - protein, 6 aa, synthetic construct
  REGION 1..6: note = Description of Artificial Sequence: Syntheticpeptide
TPYAGI

SEQ ID NO: 984 - protein, 6 aa, synthetic construct
  REGION 1..6: note = Description of Artificial Sequence: Syntheticpeptide
TPYPGV

SEQ ID NO: 985 - protein, 6 aa, synthetic construct
  REGION 1..6: note = Description of Artificial Sequence: Syntheticpeptide
TPYVDI

SEQ ID NO: 986 - protein, 6 aa, synthetic construct
  REGION 1..6: note = Description of Artificial Sequence: Syntheticpeptide
TQYGRV

SEQ ID NO: 987 - protein, 6 aa, synthetic construct
  REGION 1..6: note = Description of Artificial Sequence: Syntheticpeptide
TQYNQV

SEQ ID NO: 988 - protein, 6 aa, synthetic construct
  REGION 1..6: note = Description of Artificial Sequence: Syntheticpeptide
TRYAYV

SEQ ID NO: 989 - protein, 6 aa, synthetic construct
  REGION 1..6: note = Description of Artificial Sequence: Syntheticpeptide
TRYGEV

SEQ ID NO: 990 - protein, 6 aa, synthetic construct
  REGION 1..6: note = Description of Artificial Sequence: Syntheticpeptide
TRYHSV

SEQ ID NO: 991 - protein, 6 aa, synthetic construct
  REGION 1..6: note = Description of Artificial Sequence: Syntheticpeptide
TRYKTI

SEQ ID NO: 992 - protein, 6 aa, synthetic construct
  REGION 1..6: note = Description of Artificial Sequence: Syntheticpeptide
TRYLAI

SEQ ID NO: 993 - protein, 6 aa, synthetic construct
  REGION 1..6: note = Description of Artificial Sequence: Syntheticpeptide
TRYMAI

SEQ ID NO: 994 - protein, 6 aa, synthetic construct
  REGION 1..6: note = Description of Artificial Sequence: Syntheticpeptide
TRYQKI

SEQ ID NO: 995 - protein, 6 aa, synthetic construct
  REGION 1..6: note = Description of Artificial Sequence: Syntheticpeptide
TRYQQI

SEQ ID NO: 996 - protein, 6 aa, synthetic construct
  REGION 1..6: note = Description of Artificial Sequence: Syntheticpeptide
TRYSNI

SEQ ID NO: 997 - protein, 6 aa, synthetic construct
  REGION 1..6: note = Description of Artificial Sequence: Syntheticpeptide
TRYSPI

SEQ ID NO: 998 - protein, 6 aa, synthetic construct
  REGION 1..6: note = Description of Artificial Sequence: Syntheticpeptide
TSYGTV

SEQ ID NO: 999 - protein, 6 aa, synthetic construct
  REGION 1..6: note = Description of Artificial Sequence: Syntheticpeptide
TSYMEV

SEQ ID NO: 1000 - protein, 6 aa, synthetic construct
  REGION 1..6: note = Description of Artificial Sequence: Syntheticpeptide
TSYQGV

SEQ ID NO: 1001 - protein, 6 aa, synthetic construct
  REGION 1..6: note = Description of Artificial Sequence: Syntheticpeptide
TSYTTI

SEQ ID NO: 1002 - protein, 6 aa, synthetic construct
  REGION 1..6: note = Description of Artificial Sequence: Syntheticpeptide
TTYRSI

SEQ ID NO: 1003 - protein, 6 aa, synthetic construct
  REGION 1..6: note = Description of Artificial Sequence: Syntheticpeptide
TTYSDV

SEQ ID NO: 1004 - protein, 6 aa, synthetic construct
  REGION 1..6: note = Description of Artificial Sequence: Syntheticpeptide
TTYVTI

SEQ ID NO: 1005 - protein, 6 aa, synthetic construct
  REGION 1..6: note = Description of Artificial Sequence: Syntheticpeptide
TVYAQI

SEQ ID NO: 1006 - protein, 6 aa, synthetic construct
  REGION 1..6: note = Description of Artificial Sequence: Syntheticpeptide
TVYASV

SEQ ID NO: 1007 - protein, 6 aa, synthetic construct
  REGION 1..6: note = Description of Artificial Sequence: Syntheticpeptide
TVYEVI

SEQ ID NO: 1008 - protein, 6 aa, synthetic construct
  REGION 1..6: note = Description of Artificial Sequence: Syntheticpeptide
TVYGDV

SEQ ID NO: 1009 - protein, 6 aa, synthetic construct
  REGION 1..6: note = Description of Artificial Sequence: Syntheticpeptide
TVYKGI

SEQ ID NO: 1010 - protein, 6 aa, synthetic construct
  REGION 1..6: note = Description of Artificial Sequence: Syntheticpeptide
TVYQRV

SEQ ID NO: 1011 - protein, 6 aa, synthetic construct
  REGION 1..6: note = Description of Artificial Sequence: Syntheticpeptide
TVYSEV

SEQ ID NO: 1012 - protein, 6 aa, synthetic construct
  REGION 1..6: note = Description of Artificial Sequence: Syntheticpeptide
TVYSTV

SEQ ID NO: 1013 - protein, 6 aa, synthetic construct
  REGION 1..6: note = Description of Artificial Sequence: Syntheticpeptide
TYYHSI

SEQ ID NO: 1014 - protein, 6 aa, synthetic construct
  REGION 1..6: note = Description of Artificial Sequence: Syntheticpeptide
TYYLQI

SEQ ID NO: 1015 - protein, 6 aa, synthetic construct
  REGION 1..6: note = Description of Artificial Sequence: Syntheticpeptide
TYYYSV

SEQ ID NO: 1016 - protein, 6 aa, synthetic construct
  REGION 1..6: note = Description of Artificial Sequence: Syntheticpeptide
LLYEMV

SEQ ID NO: 1017 - protein, 6 aa, synthetic construct
  REGION 1..6: note = Description of Artificial Sequence: Syntheticpeptide
ITYFAL

SEQ ID NO: 1018 - protein, 6 aa, synthetic construct
  REGION 1..6: note = Description of Artificial Sequence: Syntheticpeptide
ISYKGL

SEQ ID NO: 1019 - protein, 6 aa, synthetic construct
  REGION 1..6: note = Description of Artificial Sequence: Syntheticpeptide
LAYHTV

SEQ ID NO: 1020 - protein, 6 aa, synthetic construct
  REGION 1..6: note = Description of Artificial Sequence: Syntheticpeptide
VQYLRL

SEQ ID NO: 1021 - protein, 6 aa, synthetic construct
  REGION 1..6: note = Description of Artificial Sequence: Syntheticpeptide
LTYVLL

SEQ ID NO: 1022 - protein, 6 aa, synthetic construct
  REGION 1..6: note = Description of Artificial Sequence: Syntheticpeptide
VRYSIV

SEQ ID NO: 1023 - protein, 6 aa, synthetic construct
  REGION 1..6: note = Description of Artificial Sequence: Syntheticpeptide
LLYLLL

SEQ ID NO: 1024 - protein, 6 aa, synthetic construct
  REGION 1..6: note = Description of Artificial Sequence: Syntheticpeptide
IAYGDI

SEQ ID NO: 1025 - protein, 6 aa, synthetic construct
  REGION 1..6: note = Description of Artificial Sequence: Syntheticpeptide
IAYRDL

SEQ ID NO: 1026 - protein, 6 aa, synthetic construct
  REGION 1..6: note = Description of Artificial Sequence: Syntheticpeptide
IAYSLL

SEQ ID NO: 1027 - protein, 6 aa, synthetic construct
  REGION 1..6: note = Description of Artificial Sequence: Syntheticpeptide
IAYSRL

SEQ ID NO: 1028 - protein, 6 aa, synthetic construct
  REGION 1..6: note = Description of Artificial Sequence: Syntheticpeptide
ICYALL

SEQ ID NO: 1029 - protein, 6 aa, synthetic construct
  REGION 1..6: note = Description of Artificial Sequence: Syntheticpeptide
ICYDAL

SEQ ID NO: 1030 - protein, 6 aa, synthetic construct
  REGION 1..6: note = Description of Artificial Sequence: Syntheticpeptide
ICYPLL

SEQ ID NO: 1031 - protein, 6 aa, synthetic construct
  REGION 1..6: note = Description of Artificial Sequence: Syntheticpeptide
ICYQLI

SEQ ID NO: 1032 - protein, 6 aa, synthetic construct
  REGION 1..6: note = Description of Artificial Sequence: Syntheticpeptide
IDYILV

SEQ ID NO: 1033 - protein, 6 aa, synthetic construct
  REGION 1..6: note = Description of Artificial Sequence: Syntheticpeptide
IDYKTL

SEQ ID NO: 1034 - protein, 6 aa, synthetic construct
  REGION 1..6: note = Description of Artificial Sequence: Syntheticpeptide
IDYTQL

SEQ ID NO: 1035 - protein, 6 aa, synthetic construct
  REGION 1..6: note = Description of Artificial Sequence: Syntheticpeptide
IDYYNL

SEQ ID NO: 1036 - protein, 6 aa, synthetic construct
  REGION 1..6: note = Description of Artificial Sequence: Syntheticpeptide
IEYCKL

SEQ ID NO: 1037 - protein, 6 aa, synthetic construct
  REGION 1..6: note = Description of Artificial Sequence: Syntheticpeptide
IEYDQI

SEQ ID NO: 1038 - protein, 6 aa, synthetic construct
  REGION 1..6: note = Description of Artificial Sequence: Syntheticpeptide
IEYGPL

SEQ ID NO: 1039 - protein, 6 aa, synthetic construct
  REGION 1..6: note = Description of Artificial Sequence: Syntheticpeptide
IEYIRV

SEQ ID NO: 1040 - protein, 6 aa, synthetic construct
  REGION 1..6: note = Description of Artificial Sequence: Syntheticpeptide
IEYKSL

SEQ ID NO: 1041 - protein, 6 aa, synthetic construct
  REGION 1..6: note = Description of Artificial Sequence: Syntheticpeptide
IEYKTL

SEQ ID NO: 1042 - protein, 6 aa, synthetic construct
  REGION 1..6: note = Description of Artificial Sequence: Syntheticpeptide
IEYSVL

SEQ ID NO: 1043 - protein, 6 aa, synthetic construct
  REGION 1..6: note = Description of Artificial Sequence: Syntheticpeptide
IEYWGI

SEQ ID NO: 1044 - protein, 6 aa, synthetic construct
  REGION 1..6: note = Description of Artificial Sequence: Syntheticpeptide
IFYGNV

SEQ ID NO: 1045 - protein, 6 aa, synthetic construct
  REGION 1..6: note = Description of Artificial Sequence: Syntheticpeptide
IFYHNL

SEQ ID NO: 1046 - protein, 6 aa, synthetic construct
  REGION 1..6: note = Description of Artificial Sequence: Syntheticpeptide
IFYKDI

SEQ ID NO: 1047 - protein, 6 aa, synthetic construct
  REGION 1..6: note = Description of Artificial Sequence: Syntheticpeptide
IFYQNV

SEQ ID NO: 1048 - protein, 6 aa, synthetic construct
  REGION 1..6: note = Description of Artificial Sequence: Syntheticpeptide
IFYRLI

SEQ ID NO: 1049 - protein, 6 aa, synthetic construct
  REGION 1..6: note = Description of Artificial Sequence: Syntheticpeptide
IGYDIL

SEQ ID NO: 1050 - protein, 6 aa, synthetic construct
  REGION 1..6: note = Description of Artificial Sequence: Syntheticpeptide
IGYDVL

SEQ ID NO: 1051 - protein, 6 aa, synthetic construct
  REGION 1..6: note = Description of Artificial Sequence: Syntheticpeptide
IGYICL

SEQ ID NO: 1052 - protein, 6 aa, synthetic construct
  REGION 1..6: note = Description of Artificial Sequence: Syntheticpeptide
IGYKAI

SEQ ID NO: 1053 - protein, 6 aa, synthetic construct
  REGION 1..6: note = Description of Artificial Sequence: Syntheticpeptide
IGYLEL

SEQ ID NO: 1054 - protein, 6 aa, synthetic construct
  REGION 1..6: note = Description of Artificial Sequence: Syntheticpeptide
IGYLPL

SEQ ID NO: 1055 - protein, 6 aa, synthetic construct
  REGION 1..6: note = Description of Artificial Sequence: Syntheticpeptide
IGYLRL

SEQ ID NO: 1056 - protein, 6 aa, synthetic construct
  REGION 1..6: note = Description of Artificial Sequence: Syntheticpeptide
IGYPFL

SEQ ID NO: 1057 - protein, 6 aa, synthetic construct
  REGION 1..6: note = Description of Artificial Sequence: Syntheticpeptide
IGYSDL

SEQ ID NO: 1058 - protein, 6 aa, synthetic construct
  REGION 1..6: note = Description of Artificial Sequence: Syntheticpeptide
IHYRQI

SEQ ID NO: 1059 - protein, 6 aa, synthetic construct
  REGION 1..6: note = Description of Artificial Sequence: Syntheticpeptide
IHYSEL

SEQ ID NO: 1060 - protein, 6 aa, synthetic construct
  REGION 1..6: note = Description of Artificial Sequence: Syntheticpeptide
IIYAFL

SEQ ID NO: 1061 - protein, 6 aa, synthetic construct
  REGION 1..6: note = Description of Artificial Sequence: Syntheticpeptide
IIYHVI

SEQ ID NO: 1062 - protein, 6 aa, synthetic construct
  REGION 1..6: note = Description of Artificial Sequence: Syntheticpeptide
IIYMFL

SEQ ID NO: 1063 - protein, 6 aa, synthetic construct
  REGION 1..6: note = Description of Artificial Sequence: Syntheticpeptide
IIYNLL

SEQ ID NO: 1064 - protein, 6 aa, synthetic construct
  REGION 1..6: note = Description of Artificial Sequence: Syntheticpeptide
IIYNNL

SEQ ID NO: 1065 - protein, 6 aa, synthetic construct
  REGION 1..6: note = Description of Artificial Sequence: Syntheticpeptide
IIYSEV

SEQ ID NO: 1066 - protein, 6 aa, synthetic construct
  REGION 1..6: note = Description of Artificial Sequence: Syntheticpeptide
IKYCLV

SEQ ID NO: 1067 - protein, 6 aa, synthetic construct
  REGION 1..6: note = Description of Artificial Sequence: Syntheticpeptide
IKYKEL

SEQ ID NO: 1068 - protein, 6 aa, synthetic construct
  REGION 1..6: note = Description of Artificial Sequence: Syntheticpeptide
IKYLAL

SEQ ID NO: 1069 - protein, 6 aa, synthetic construct
  REGION 1..6: note = Description of Artificial Sequence: Syntheticpeptide
IKYTCI

SEQ ID NO: 1070 - protein, 6 aa, synthetic construct
  REGION 1..6: note = Description of Artificial Sequence: Syntheticpeptide
ILYADI

SEQ ID NO: 1071 - protein, 6 aa, synthetic construct
  REGION 1..6: note = Description of Artificial Sequence: Syntheticpeptide
ILYAFL

SEQ ID NO: 1072 - protein, 6 aa, synthetic construct
  REGION 1..6: note = Description of Artificial Sequence: Syntheticpeptide
ILYCSV

SEQ ID NO: 1073 - protein, 6 aa, synthetic construct
  REGION 1..6: note = Description of Artificial Sequence: Syntheticpeptide
ILYEGL

SEQ ID NO: 1074 - protein, 6 aa, synthetic construct
  REGION 1..6: note = Description of Artificial Sequence: Syntheticpeptide
ILYELL

SEQ ID NO: 1075 - protein, 6 aa, synthetic construct
  REGION 1..6: note = Description of Artificial Sequence: Syntheticpeptide
ILYFQI

SEQ ID NO: 1076 - protein, 6 aa, synthetic construct
  REGION 1..6: note = Description of Artificial Sequence: Syntheticpeptide
ILYHTV

SEQ ID NO: 1077 - protein, 6 aa, synthetic construct
  REGION 1..6: note = Description of Artificial Sequence: Syntheticpeptide
ILYLQV

SEQ ID NO: 1078 - protein, 6 aa, synthetic construct
  REGION 1..6: note = Description of Artificial Sequence: Syntheticpeptide
ILYSIL

SEQ ID NO: 1079 - protein, 6 aa, synthetic construct
  REGION 1..6: note = Description of Artificial Sequence: Syntheticpeptide
ILYSVL

SEQ ID NO: 1080 - protein, 6 aa, synthetic construct
  REGION 1..6: note = Description of Artificial Sequence: Syntheticpeptide
ILYTEL

SEQ ID NO: 1081 - protein, 6 aa, synthetic construct
  REGION 1..6: note = Description of Artificial Sequence: Syntheticpeptide
ILYTIL

SEQ ID NO: 1082 - protein, 6 aa, synthetic construct
  REGION 1..6: note = Description of Artificial Sequence: Syntheticpeptide
IMYTLV

SEQ ID NO: 1083 - protein, 6 aa, synthetic construct
  REGION 1..6: note = Description of Artificial Sequence: Syntheticpeptide
INYCSV

SEQ ID NO: 1084 - protein, 6 aa, synthetic construct
  REGION 1..6: note = Description of Artificial Sequence: Syntheticpeptide
INYKDI

SEQ ID NO: 1085 - protein, 6 aa, synthetic construct
  REGION 1..6: note = Description of Artificial Sequence: Syntheticpeptide
INYTTV

SEQ ID NO: 1086 - protein, 6 aa, synthetic construct
  REGION 1..6: note = Description of Artificial Sequence: Syntheticpeptide
INYVLL

SEQ ID NO: 1087 - protein, 6 aa, synthetic construct
  REGION 1..6: note = Description of Artificial Sequence: Syntheticpeptide
IPYDVL

SEQ ID NO: 1088 - protein, 6 aa, synthetic construct
  REGION 1..6: note = Description of Artificial Sequence: Syntheticpeptide
IPYLLV

SEQ ID NO: 1089 - protein, 6 aa, synthetic construct
  REGION 1..6: note = Description of Artificial Sequence: Syntheticpeptide
IPYRTV

SEQ ID NO: 1090 - protein, 6 aa, synthetic construct
  REGION 1..6: note = Description of Artificial Sequence: Syntheticpeptide
IPYSQL

SEQ ID NO: 1091 - protein, 6 aa, synthetic construct
  REGION 1..6: note = Description of Artificial Sequence: Syntheticpeptide
IPYSRI

SEQ ID NO: 1092 - protein, 6 aa, synthetic construct
  REGION 1..6: note = Description of Artificial Sequence: Syntheticpeptide
IPYTQI

SEQ ID NO: 1093 - protein, 6 aa, synthetic construct
  REGION 1..6: note = Description of Artificial Sequence: Syntheticpeptide
IQYAPL

SEQ ID NO: 1094 - protein, 6 aa, synthetic construct
  REGION 1..6: note = Description of Artificial Sequence: Syntheticpeptide
IQYASL

SEQ ID NO: 1095 - protein, 6 aa, synthetic construct
  REGION 1..6: note = Description of Artificial Sequence: Syntheticpeptide
IQYERL

SEQ ID NO: 1096 - protein, 6 aa, synthetic construct
  REGION 1..6: note = Description of Artificial Sequence: Syntheticpeptide
IQYGII

SEQ ID NO: 1097 - protein, 6 aa, synthetic construct
  REGION 1..6: note = Description of Artificial Sequence: Syntheticpeptide
IQYGNV

SEQ ID NO: 1098 - protein, 6 aa, synthetic construct
  REGION 1..6: note = Description of Artificial Sequence: Syntheticpeptide
IQYGRV

SEQ ID NO: 1099 - protein, 6 aa, synthetic construct
  REGION 1..6: note = Description of Artificial Sequence: Syntheticpeptide
IQYNVV

SEQ ID NO: 1100 - protein, 6 aa, synthetic construct
  REGION 1..6: note = Description of Artificial Sequence: Syntheticpeptide
IQYRSI

SEQ ID NO: 1101 - protein, 6 aa, synthetic construct
  REGION 1..6: note = Description of Artificial Sequence: Syntheticpeptide
TVYSEV

SEQ ID NO: 1102 - protein, 6 aa, synthetic construct
  REGION 1..6: note = Description of Artificial Sequence: Syntheticpeptide
IQYWGI

SEQ ID NO: 1103 - protein, 6 aa, synthetic construct
  REGION 1..6: note = Description of Artificial Sequence: Syntheticpeptide
IRYANL

SEQ ID NO: 1104 - protein, 6 aa, synthetic construct
  REGION 1..6: note = Description of Artificial Sequence: Syntheticpeptide
IRYLDL

SEQ ID NO: 1105 - protein, 6 aa, synthetic construct
  REGION 1..6: note = Description of Artificial Sequence: Syntheticpeptide
IRYPLL

SEQ ID NO: 1106 - protein, 6 aa, synthetic construct
  REGION 1..6: note = Description of Artificial Sequence: Syntheticpeptide
IRYRLL

SEQ ID NO: 1107 - protein, 6 aa, synthetic construct
  REGION 1..6: note = Description of Artificial Sequence: Syntheticpeptide
IRYRTI

SEQ ID NO: 1108 - protein, 6 aa, synthetic construct
  REGION 1..6: note = Description of Artificial Sequence: Syntheticpeptide
ISYASL

SEQ ID NO: 1109 - protein, 6 aa, synthetic construct
  REGION 1..6: note = Description of Artificial Sequence: Syntheticpeptide
ISYCGV

SEQ ID NO: 1110 - protein, 6 aa, synthetic construct
  REGION 1..6: note = Description of Artificial Sequence: Syntheticpeptide
ISYEPI

SEQ ID NO: 1111 - protein, 6 aa, synthetic construct
  REGION 1..6: note = Description of Artificial Sequence: Syntheticpeptide
ISYFQI

SEQ ID NO: 1112 - protein, 6 aa, synthetic construct
  REGION 1..6: note = Description of Artificial Sequence: Syntheticpeptide
ISYGLI

SEQ ID NO: 1113 - protein, 6 aa, synthetic construct
  REGION 1..6: note = Description of Artificial Sequence: Syntheticpeptide
ISYKKL

SEQ ID NO: 1114 - protein, 6 aa, synthetic construct
  REGION 1..6: note = Description of Artificial Sequence: Syntheticpeptide
ISYLPL

SEQ ID NO: 1115 - protein, 6 aa, synthetic construct
  REGION 1..6: note = Description of Artificial Sequence: Syntheticpeptide
ISYPML

SEQ ID NO: 1116 - protein, 6 aa, synthetic construct
  REGION 1..6: note = Description of Artificial Sequence: Syntheticpeptide
ISYTTL

SEQ ID NO: 1117 - protein, 6 aa, synthetic construct
  REGION 1..6: note = Description of Artificial Sequence: Syntheticpeptide
ITYAAV

SEQ ID NO: 1118 - protein, 6 aa, synthetic construct
  REGION 1..6: note = Description of Artificial Sequence: Syntheticpeptide
ITYADL

SEQ ID NO: 1119 - protein, 6 aa, synthetic construct
  REGION 1..6: note = Description of Artificial Sequence: Syntheticpeptide
ITYAEL

SEQ ID NO: 1120 - protein, 6 aa, synthetic construct
  REGION 1..6: note = Description of Artificial Sequence: Syntheticpeptide
ITYAEV

SEQ ID NO: 1121 - protein, 6 aa, synthetic construct
  REGION 1..6: note = Description of Artificial Sequence: Syntheticpeptide
ITYASV

SEQ ID NO: 1122 - protein, 6 aa, synthetic construct
  REGION 1..6: note = Description of Artificial Sequence: Syntheticpeptide
ITYDLI

SEQ ID NO: 1123 - protein, 6 aa, synthetic construct
  REGION 1..6: note = Description of Artificial Sequence: Syntheticpeptide
ITYENV

SEQ ID NO: 1124 - protein, 6 aa, synthetic construct
  REGION 1..6: note = Description of Artificial Sequence: Syntheticpeptide
ITYQLL

SEQ ID NO: 1125 - protein, 6 aa, synthetic construct
  REGION 1..6: note = Description of Artificial Sequence: Syntheticpeptide
ITYSLL

SEQ ID NO: 1126 - protein, 6 aa, synthetic construct
  REGION 1..6: note = Description of Artificial Sequence: Syntheticpeptide
IVYAEL

SEQ ID NO: 1127 - protein, 6 aa, synthetic construct
  REGION 1..6: note = Description of Artificial Sequence: Syntheticpeptide
IVYALV

SEQ ID NO: 1128 - protein, 6 aa, synthetic construct
  REGION 1..6: note = Description of Artificial Sequence: Syntheticpeptide
IVYASL

SEQ ID NO: 1129 - protein, 6 aa, synthetic construct
  REGION 1..6: note = Description of Artificial Sequence: Syntheticpeptide
IVYEIL

SEQ ID NO: 1130 - protein, 6 aa, synthetic construct
  REGION 1..6: note = Description of Artificial Sequence: Syntheticpeptide
IVYFIL

SEQ ID NO: 1131 - protein, 6 aa, synthetic construct
  REGION 1..6: note = Description of Artificial Sequence: Syntheticpeptide
IVYHML

SEQ ID NO: 1132 - protein, 6 aa, synthetic construct
  REGION 1..6: note = Description of Artificial Sequence: Syntheticpeptide
IVYLCI

SEQ ID NO: 1133 - protein, 6 aa, synthetic construct
  REGION 1..6: note = Description of Artificial Sequence: Syntheticpeptide
IVYRLL

SEQ ID NO: 1134 - protein, 6 aa, synthetic construct
  REGION 1..6: note = Description of Artificial Sequence: Syntheticpeptide
IVYSAL

SEQ ID NO: 1135 - protein, 6 aa, synthetic construct
  REGION 1..6: note = Description of Artificial Sequence: Syntheticpeptide
IVYSWV

SEQ ID NO: 1136 - protein, 6 aa, synthetic construct
  REGION 1..6: note = Description of Artificial Sequence: Syntheticpeptide
IVYTEL

SEQ ID NO: 1137 - protein, 6 aa, synthetic construct
  REGION 1..6: note = Description of Artificial Sequence: Syntheticpeptide
IVYYIL

SEQ ID NO: 1138 - protein, 6 aa, synthetic construct
  REGION 1..6: note = Description of Artificial Sequence: Syntheticpeptide
IWYENL

SEQ ID NO: 1139 - protein, 6 aa, synthetic construct
  REGION 1..6: note = Description of Artificial Sequence: Syntheticpeptide
IWYFVV

SEQ ID NO: 1140 - protein, 6 aa, synthetic construct
  REGION 1..6: note = Description of Artificial Sequence: Syntheticpeptide
IWYNIL

SEQ ID NO: 1141 - protein, 6 aa, synthetic construct
  REGION 1..6: note = Description of Artificial Sequence: Syntheticpeptide
IYYLGV

SEQ ID NO: 1142 - protein, 6 aa, synthetic construct
  REGION 1..6: note = Description of Artificial Sequence: Syntheticpeptide
LAYALL

SEQ ID NO: 1143 - protein, 6 aa, synthetic construct
  REGION 1..6: note = Description of Artificial Sequence: Syntheticpeptide
LAYARI

SEQ ID NO: 1144 - protein, 6 aa, synthetic construct
  REGION 1..6: note = Description of Artificial Sequence: Syntheticpeptide
LAYDSV

SEQ ID NO: 1145 - protein, 6 aa, synthetic construct
  REGION 1..6: note = Description of Artificial Sequence: Syntheticpeptide
LAYFGV

SEQ ID NO: 1146 - protein, 6 aa, synthetic construct
  REGION 1..6: note = Description of Artificial Sequence: Syntheticpeptide
LAYHRL

SEQ ID NO: 1147 - protein, 6 aa, synthetic construct
  REGION 1..6: note = Description of Artificial Sequence: Syntheticpeptide
LAYKDL

SEQ ID NO: 1148 - protein, 6 aa, synthetic construct
  REGION 1..6: note = Description of Artificial Sequence: Syntheticpeptide
LAYKRI

SEQ ID NO: 1149 - protein, 6 aa, synthetic construct
  REGION 1..6: note = Description of Artificial Sequence: Syntheticpeptide
LAYPPL

SEQ ID NO: 1150 - protein, 6 aa, synthetic construct
  REGION 1..6: note = Description of Artificial Sequence: Syntheticpeptide
LAYQTL

SEQ ID NO: 1151 - protein, 6 aa, synthetic construct
  REGION 1..6: note = Description of Artificial Sequence: Syntheticpeptide
LAYREV

SEQ ID NO: 1152 - protein, 6 aa, synthetic construct
  REGION 1..6: note = Description of Artificial Sequence: Syntheticpeptide
LAYRII

SEQ ID NO: 1153 - protein, 6 aa, synthetic construct
  REGION 1..6: note = Description of Artificial Sequence: Syntheticpeptide
LAYRLL

SEQ ID NO: 1154 - protein, 6 aa, synthetic construct
  REGION 1..6: note = Description of Artificial Sequence: Syntheticpeptide
LAYSQL

SEQ ID NO: 1155 - protein, 6 aa, synthetic construct
  REGION 1..6: note = Description of Artificial Sequence: Syntheticpeptide
LAYSSV

SEQ ID NO: 1156 - protein, 6 aa, synthetic construct
  REGION 1..6: note = Description of Artificial Sequence: Syntheticpeptide
LAYTLL

SEQ ID NO: 1157 - protein, 6 aa, synthetic construct
  REGION 1..6: note = Description of Artificial Sequence: Syntheticpeptide
LAYWGI

SEQ ID NO: 1158 - protein, 6 aa, synthetic construct
  REGION 1..6: note = Description of Artificial Sequence: Syntheticpeptide
LAYYTV

SEQ ID NO: 1159 - protein, 6 aa, synthetic construct
  REGION 1..6: note = Description of Artificial Sequence: Syntheticpeptide
LCYADL

SEQ ID NO: 1160 - protein, 6 aa, synthetic construct
  REGION 1..6: note = Description of Artificial Sequence: Syntheticpeptide
LCYAIL

SEQ ID NO: 1161 - protein, 6 aa, synthetic construct
  REGION 1..6: note = Description of Artificial Sequence: Syntheticpeptide
LCYFHL

SEQ ID NO: 1162 - protein, 6 aa, synthetic construct
  REGION 1..6: note = Description of Artificial Sequence: Syntheticpeptide
LCYHPI

SEQ ID NO: 1163 - protein, 6 aa, synthetic construct
  REGION 1..6: note = Description of Artificial Sequence: Syntheticpeptide
LCYKEI

SEQ ID NO: 1164 - protein, 6 aa, synthetic construct
  REGION 1..6: note = Description of Artificial Sequence: Syntheticpeptide
LCYKFL

SEQ ID NO: 1165 - protein, 6 aa, synthetic construct
  REGION 1..6: note = Description of Artificial Sequence: Syntheticpeptide
LCYMII

SEQ ID NO: 1166 - protein, 6 aa, synthetic construct
  REGION 1..6: note = Description of Artificial Sequence: Syntheticpeptide
LCYRKI

SEQ ID NO: 1167 - protein, 6 aa, synthetic construct
  REGION 1..6: note = Description of Artificial Sequence: Syntheticpeptide
LCYRVL

SEQ ID NO: 1168 - protein, 6 aa, synthetic construct
  REGION 1..6: note = Description of Artificial Sequence: Syntheticpeptide
LCYSTV

SEQ ID NO: 1169 - protein, 6 aa, synthetic construct
  REGION 1..6: note = Description of Artificial Sequence: Syntheticpeptide
LCYTLV

SEQ ID NO: 1170 - protein, 6 aa, synthetic construct
  REGION 1..6: note = Description of Artificial Sequence: Syntheticpeptide
LDYASI

SEQ ID NO: 1171 - protein, 6 aa, synthetic construct
  REGION 1..6: note = Description of Artificial Sequence: Syntheticpeptide
LDYCEL

SEQ ID NO: 1172 - protein, 6 aa, synthetic construct
  REGION 1..6: note = Description of Artificial Sequence: Syntheticpeptide
LDYDKI

SEQ ID NO: 1173 - protein, 6 aa, synthetic construct
  REGION 1..6: note = Description of Artificial Sequence: Syntheticpeptide
LDYDKL

SEQ ID NO: 1174 - protein, 6 aa, synthetic construct
  REGION 1..6: note = Description of Artificial Sequence: Syntheticpeptide
LDYDYL

SEQ ID NO: 1175 - protein, 6 aa, synthetic construct
  REGION 1..6: note = Description of Artificial Sequence: Syntheticpeptide
LDYDYV

SEQ ID NO: 1176 - protein, 6 aa, synthetic construct
  REGION 1..6: note = Description of Artificial Sequence: Syntheticpeptide
LDYEFL

SEQ ID NO: 1177 - protein, 6 aa, synthetic construct
  REGION 1..6: note = Description of Artificial Sequence: Syntheticpeptide
LDYINV

SEQ ID NO: 1178 - protein, 6 aa, synthetic construct
  REGION 1..6: note = Description of Artificial Sequence: Syntheticpeptide
LDYNNL

SEQ ID NO: 1179 - protein, 6 aa, synthetic construct
  REGION 1..6: note = Description of Artificial Sequence: Syntheticpeptide
LDYPHV

SEQ ID NO: 1180 - protein, 6 aa, synthetic construct
  REGION 1..6: note = Description of Artificial Sequence: Syntheticpeptide
LDYSPV

SEQ ID NO: 1181 - protein, 6 aa, synthetic construct
  REGION 1..6: note = Description of Artificial Sequence: Syntheticpeptide
LDYVEI

SEQ ID NO: 1182 - protein, 6 aa, synthetic construct
  REGION 1..6: note = Description of Artificial Sequence: Syntheticpeptide
LDYWGI

SEQ ID NO: 1183 - protein, 6 aa, synthetic construct
  REGION 1..6: note = Description of Artificial Sequence: Syntheticpeptide
LEYAPV

SEQ ID NO: 1184 - protein, 6 aa, synthetic construct
  REGION 1..6: note = Description of Artificial Sequence: Syntheticpeptide
LEYIPL

SEQ ID NO: 1185 - protein, 6 aa, synthetic construct
  REGION 1..6: note = Description of Artificial Sequence: Syntheticpeptide
LEYKTI

SEQ ID NO: 1186 - protein, 6 aa, synthetic construct
  REGION 1..6: note = Description of Artificial Sequence: Syntheticpeptide
LEYLCL

SEQ ID NO: 1187 - protein, 6 aa, synthetic construct
  REGION 1..6: note = Description of Artificial Sequence: Syntheticpeptide
LEYLKL

SEQ ID NO: 1188 - protein, 6 aa, synthetic construct
  REGION 1..6: note = Description of Artificial Sequence: Syntheticpeptide
LEYLQI

SEQ ID NO: 1189 - protein, 6 aa, synthetic construct
  REGION 1..6: note = Description of Artificial Sequence: Syntheticpeptide
LEYLQL

SEQ ID NO: 1190 - protein, 6 aa, synthetic construct
  REGION 1..6: note = Description of Artificial Sequence: Syntheticpeptide
LEYQRL

SEQ ID NO: 1191 - protein, 6 aa, synthetic construct
  REGION 1..6: note = Description of Artificial Sequence: Syntheticpeptide
LEYVDL

SEQ ID NO: 1192 - protein, 6 aa, synthetic construct
  REGION 1..6: note = Description of Artificial Sequence: Syntheticpeptide
LEYVSV

SEQ ID NO: 1193 - protein, 6 aa, synthetic construct
  REGION 1..6: note = Description of Artificial Sequence: Syntheticpeptide
LEYYQI

SEQ ID NO: 1194 - protein, 6 aa, synthetic construct
  REGION 1..6: note = Description of Artificial Sequence: Syntheticpeptide
LFYAQL

SEQ ID NO: 1195 - protein, 6 aa, synthetic construct
  REGION 1..6: note = Description of Artificial Sequence: Syntheticpeptide
LFYCSV

SEQ ID NO: 1196 - protein, 6 aa, synthetic construct
  REGION 1..6: note = Description of Artificial Sequence: Syntheticpeptide
LFYERV

SEQ ID NO: 1197 - protein, 6 aa, synthetic construct
  REGION 1..6: note = Description of Artificial Sequence: Syntheticpeptide
LFYGFL

SEQ ID NO: 1198 - protein, 6 aa, synthetic construct
  REGION 1..6: note = Description of Artificial Sequence: Syntheticpeptide
LFYKYV

SEQ ID NO: 1199 - protein, 6 aa, synthetic construct
  REGION 1..6: note = Description of Artificial Sequence: Syntheticpeptide
LFYLLL

SEQ ID NO: 1200 - protein, 6 aa, synthetic construct
  REGION 1..6: note = Description of Artificial Sequence: Syntheticpeptide
LFYNKV

SEQ ID NO: 1201 - protein, 6 aa, synthetic construct
  REGION 1..6: note = Description of Artificial Sequence: Syntheticpeptide
LFYRHL

SEQ ID NO: 1202 - protein, 6 aa, synthetic construct
  REGION 1..6: note = Description of Artificial Sequence: Syntheticpeptide
LFYTLL

SEQ ID NO: 1203 - protein, 6 aa, synthetic construct
  REGION 1..6: note = Description of Artificial Sequence: Syntheticpeptide
LFYWDV

SEQ ID NO: 1204 - protein, 6 aa, synthetic construct
  REGION 1..6: note = Description of Artificial Sequence: Syntheticpeptide
LFYWKL

SEQ ID NO: 1205 - protein, 6 aa, synthetic construct
  REGION 1..6: note = Description of Artificial Sequence: Syntheticpeptide
LGYGNV

SEQ ID NO: 1206 - protein, 6 aa, synthetic construct
  REGION 1..6: note = Description of Artificial Sequence: Syntheticpeptide
LGYKEL

SEQ ID NO: 1207 - protein, 6 aa, synthetic construct
  REGION 1..6: note = Description of Artificial Sequence: Syntheticpeptide
LGYLQL

SEQ ID NO: 1208 - protein, 6 aa, synthetic construct
  REGION 1..6: note = Description of Artificial Sequence: Syntheticpeptide
LGYPLI

SEQ ID NO: 1209 - protein, 6 aa, synthetic construct
  REGION 1..6: note = Description of Artificial Sequence: Syntheticpeptide
LGYPWV

SEQ ID NO: 1210 - protein, 6 aa, synthetic construct
  REGION 1..6: note = Description of Artificial Sequence: Syntheticpeptide
LGYSAL

SEQ ID NO: 1211 - protein, 6 aa, synthetic construct
  REGION 1..6: note = Description of Artificial Sequence: Syntheticpeptide
LGYSDL

SEQ ID NO: 1212 - protein, 6 aa, synthetic construct
  REGION 1..6: note = Description of Artificial Sequence: Syntheticpeptide
LGYVTL

SEQ ID NO: 1213 - protein, 6 aa, synthetic construct
  REGION 1..6: note = Description of Artificial Sequence: Syntheticpeptide
LHYAKI

SEQ ID NO: 1214 - protein, 6 aa, synthetic construct
  REGION 1..6: note = Description of Artificial Sequence: Syntheticpeptide
LHYALV

SEQ ID NO: 1215 - protein, 6 aa, synthetic construct
  REGION 1..6: note = Description of Artificial Sequence: Syntheticpeptide
LHYANL

SEQ ID NO: 1216 - protein, 6 aa, synthetic construct
  REGION 1..6: note = Description of Artificial Sequence: Syntheticpeptide
LHYARL

SEQ ID NO: 1217 - protein, 6 aa, synthetic construct
  REGION 1..6: note = Description of Artificial Sequence: Syntheticpeptide
LHYASI

SEQ ID NO: 1218 - protein, 6 aa, synthetic construct
  REGION 1..6: note = Description of Artificial Sequence: Syntheticpeptide
LHYASL

SEQ ID NO: 1219 - protein, 6 aa, synthetic construct
  REGION 1..6: note = Description of Artificial Sequence: Syntheticpeptide
LHYASV

SEQ ID NO: 1220 - protein, 6 aa, synthetic construct
  REGION 1..6: note = Description of Artificial Sequence: Syntheticpeptide
LHYATI

SEQ ID NO: 1221 - protein, 6 aa, synthetic construct
  REGION 1..6: note = Description of Artificial Sequence: Syntheticpeptide
LHYATL

SEQ ID NO: 1222 - protein, 6 aa, synthetic construct
  REGION 1..6: note = Description of Artificial Sequence: Syntheticpeptide
LHYAVL

SEQ ID NO: 1223 - protein, 6 aa, synthetic construct
  REGION 1..6: note = Description of Artificial Sequence: Syntheticpeptide
LHYDVV

SEQ ID NO: 1224 - protein, 6 aa, synthetic construct
  REGION 1..6: note = Description of Artificial Sequence: Syntheticpeptide
LHYEGL

SEQ ID NO: 1225 - protein, 6 aa, synthetic construct
  REGION 1..6: note = Description of Artificial Sequence: Syntheticpeptide
LHYETI

SEQ ID NO: 1226 - protein, 6 aa, synthetic construct
  REGION 1..6: note = Description of Artificial Sequence: Syntheticpeptide
LHYFEI

SEQ ID NO: 1227 - protein, 6 aa, synthetic construct
  REGION 1..6: note = Description of Artificial Sequence: Syntheticpeptide
LHYFVV

SEQ ID NO: 1228 - protein, 6 aa, synthetic construct
  REGION 1..6: note = Description of Artificial Sequence: Syntheticpeptide
LHYGAI

SEQ ID NO: 1229 - protein, 6 aa, synthetic construct
  REGION 1..6: note = Description of Artificial Sequence: Syntheticpeptide
LHYILI

SEQ ID NO: 1230 - protein, 6 aa, synthetic construct
  REGION 1..6: note = Description of Artificial Sequence: Syntheticpeptide
LHYINL

SEQ ID NO: 1231 - protein, 6 aa, synthetic construct
  REGION 1..6: note = Description of Artificial Sequence: Syntheticpeptide
LHYKRI

SEQ ID NO: 1232 - protein, 6 aa, synthetic construct
  REGION 1..6: note = Description of Artificial Sequence: Syntheticpeptide
LHYLDL

SEQ ID NO: 1233 - protein, 6 aa, synthetic construct
  REGION 1..6: note = Description of Artificial Sequence: Syntheticpeptide
LHYLNI

SEQ ID NO: 1234 - protein, 6 aa, synthetic construct
  REGION 1..6: note = Description of Artificial Sequence: Syntheticpeptide
LHYLTI

SEQ ID NO: 1235 - protein, 6 aa, synthetic construct
  REGION 1..6: note = Description of Artificial Sequence: Syntheticpeptide
LHYLVI

SEQ ID NO: 1236 - protein, 6 aa, synthetic construct
  REGION 1..6: note = Description of Artificial Sequence: Syntheticpeptide
LHYMAI

SEQ ID NO: 1237 - protein, 6 aa, synthetic construct
  REGION 1..6: note = Description of Artificial Sequence: Syntheticpeptide
LHYMII

SEQ ID NO: 1238 - protein, 6 aa, synthetic construct
  REGION 1..6: note = Description of Artificial Sequence: Syntheticpeptide
LHYMNI

SEQ ID NO: 1239 - protein, 6 aa, synthetic construct
  REGION 1..6: note = Description of Artificial Sequence: Syntheticpeptide
LHYMTI

SEQ ID NO: 1240 - protein, 6 aa, synthetic construct
  REGION 1..6: note = Description of Artificial Sequence: Syntheticpeptide
LHYMTL

SEQ ID NO: 1241 - protein, 6 aa, synthetic construct
  REGION 1..6: note = Description of Artificial Sequence: Syntheticpeptide
LHYMTV

SEQ ID NO: 1242 - protein, 6 aa, synthetic construct
  REGION 1..6: note = Description of Artificial Sequence: Syntheticpeptide
LHYMVI

SEQ ID NO: 1243 - protein, 6 aa, synthetic construct
  REGION 1..6: note = Description of Artificial Sequence: Syntheticpeptide
LHYNML

SEQ ID NO: 1244 - protein, 6 aa, synthetic construct
  REGION 1..6: note = Description of Artificial Sequence: Syntheticpeptide
LHYPAL

SEQ ID NO: 1245 - protein, 6 aa, synthetic construct
  REGION 1..6: note = Description of Artificial Sequence: Syntheticpeptide
LHYPDL

SEQ ID NO: 1246 - protein, 6 aa, synthetic construct
  REGION 1..6: note = Description of Artificial Sequence: Syntheticpeptide
LHYPII

SEQ ID NO: 1247 - protein, 6 aa, synthetic construct
  REGION 1..6: note = Description of Artificial Sequence: Syntheticpeptide
LHYPIL

SEQ ID NO: 1248 - protein, 6 aa, synthetic construct
  REGION 1..6: note = Description of Artificial Sequence: Syntheticpeptide
LHYPLL

SEQ ID NO: 1249 - protein, 6 aa, synthetic construct
  REGION 1..6: note = Description of Artificial Sequence: Syntheticpeptide
LHYPML

SEQ ID NO: 1250 - protein, 6 aa, synthetic construct
  REGION 1..6: note = Description of Artificial Sequence: Syntheticpeptide
LHYPNV

SEQ ID NO: 1251 - protein, 6 aa, synthetic construct
  REGION 1..6: note = Description of Artificial Sequence: Syntheticpeptide
LHYPSI

SEQ ID NO: 1252 - protein, 6 aa, synthetic construct
  REGION 1..6: note = Description of Artificial Sequence: Syntheticpeptide
LHYPTI

SEQ ID NO: 1253 - protein, 6 aa, synthetic construct
  REGION 1..6: note = Description of Artificial Sequence: Syntheticpeptide
LHYPTL

SEQ ID NO: 1254 - protein, 6 aa, synthetic construct
  REGION 1..6: note = Description of Artificial Sequence: Syntheticpeptide
LHYPTV

SEQ ID NO: 1255 - protein, 6 aa, synthetic construct
  REGION 1..6: note = Description of Artificial Sequence: Syntheticpeptide
LHYPVI

SEQ ID NO: 1256 - protein, 6 aa, synthetic construct
  REGION 1..6: note = Description of Artificial Sequence: Syntheticpeptide
LHYPVL

SEQ ID NO: 1257 - protein, 6 aa, synthetic construct
  REGION 1..6: note = Description of Artificial Sequence: Syntheticpeptide
LHYRII

SEQ ID NO: 1258 - protein, 6 aa, synthetic construct
  REGION 1..6: note = Description of Artificial Sequence: Syntheticpeptide
LHYRTI

SEQ ID NO: 1259 - protein, 6 aa, synthetic construct
  REGION 1..6: note = Description of Artificial Sequence: Syntheticpeptide
LHYSII

SEQ ID NO: 1260 - protein, 6 aa, synthetic construct
  REGION 1..6: note = Description of Artificial Sequence: Syntheticpeptide
LHYSSI

SEQ ID NO: 1261 - protein, 6 aa, synthetic construct
  REGION 1..6: note = Description of Artificial Sequence: Syntheticpeptide
LHYSTI

SEQ ID NO: 1262 - protein, 6 aa, synthetic construct
  REGION 1..6: note = Description of Artificial Sequence: Syntheticpeptide
LHYSTL

SEQ ID NO: 1263 - protein, 6 aa, synthetic construct
  REGION 1..6: note = Description of Artificial Sequence: Syntheticpeptide
LHYSVI

SEQ ID NO: 1264 - protein, 6 aa, synthetic construct
  REGION 1..6: note = Description of Artificial Sequence: Syntheticpeptide
LHYTAI

SEQ ID NO: 1265 - protein, 6 aa, synthetic construct
  REGION 1..6: note = Description of Artificial Sequence: Syntheticpeptide
LHYTAL

SEQ ID NO: 1266 - protein, 6 aa, synthetic construct
  REGION 1..6: note = Description of Artificial Sequence: Syntheticpeptide
LHYTII

SEQ ID NO: 1267 - protein, 6 aa, synthetic construct
  REGION 1..6: note = Description of Artificial Sequence: Syntheticpeptide
LHYTKV

SEQ ID NO: 1268 - protein, 6 aa, synthetic construct
  REGION 1..6: note = Description of Artificial Sequence: Syntheticpeptide
LHYTLI

SEQ ID NO: 1269 - protein, 6 aa, synthetic construct
  REGION 1..6: note = Description of Artificial Sequence: Syntheticpeptide
LHYTSI

SEQ ID NO: 1270 - protein, 6 aa, synthetic construct
  REGION 1..6: note = Description of Artificial Sequence: Syntheticpeptide
LHYTTI

SEQ ID NO: 1271 - protein, 6 aa, synthetic construct
  REGION 1..6: note = Description of Artificial Sequence: Syntheticpeptide
LHYTTV

SEQ ID NO: 1272 - protein, 6 aa, synthetic construct
  REGION 1..6: note = Description of Artificial Sequence: Syntheticpeptide
LHYTVI

SEQ ID NO: 1273 - protein, 6 aa, synthetic construct
  REGION 1..6: note = Description of Artificial Sequence: Syntheticpeptide
LHYTVL

SEQ ID NO: 1274 - protein, 6 aa, synthetic construct
  REGION 1..6: note = Description of Artificial Sequence: Syntheticpeptide
LHYTVV

SEQ ID NO: 1275 - protein, 6 aa, synthetic construct
  REGION 1..6: note = Description of Artificial Sequence: Syntheticpeptide
LHYVSI

SEQ ID NO: 1276 - protein, 6 aa, synthetic construct
  REGION 1..6: note = Description of Artificial Sequence: Syntheticpeptide
LHYVTI

SEQ ID NO: 1277 - protein, 6 aa, synthetic construct
  REGION 1..6: note = Description of Artificial Sequence: Syntheticpeptide
LHYVVI

SEQ ID NO: 1278 - protein, 6 aa, synthetic construct
  REGION 1..6: note = Description of Artificial Sequence: Syntheticpeptide
LIYEKL

SEQ ID NO: 1279 - protein, 6 aa, synthetic construct
  REGION 1..6: note = Description of Artificial Sequence: Syntheticpeptide
LIYENV

SEQ ID NO: 1280 - protein, 6 aa, synthetic construct
  REGION 1..6: note = Description of Artificial Sequence: Syntheticpeptide
LIYKDL

SEQ ID NO: 1281 - protein, 6 aa, synthetic construct
  REGION 1..6: note = Description of Artificial Sequence: Syntheticpeptide
LIYNSL

SEQ ID NO: 1282 - protein, 6 aa, synthetic construct
  REGION 1..6: note = Description of Artificial Sequence: Syntheticpeptide
LIYSGL

SEQ ID NO: 1283 - protein, 6 aa, synthetic construct
  REGION 1..6: note = Description of Artificial Sequence: Syntheticpeptide
LIYTLL

SEQ ID NO: 1284 - protein, 6 aa, synthetic construct
  REGION 1..6: note = Description of Artificial Sequence: Syntheticpeptide
LIYTVL

SEQ ID NO: 1285 - protein, 6 aa, synthetic construct
  REGION 1..6: note = Description of Artificial Sequence: Syntheticpeptide
LIYWEI

SEQ ID NO: 1286 - protein, 6 aa, synthetic construct
  REGION 1..6: note = Description of Artificial Sequence: Syntheticpeptide
LKYCEL

SEQ ID NO: 1287 - protein, 6 aa, synthetic construct
  REGION 1..6: note = Description of Artificial Sequence: Syntheticpeptide
LKYDKL

SEQ ID NO: 1288 - protein, 6 aa, synthetic construct
  REGION 1..6: note = Description of Artificial Sequence: Syntheticpeptide
LKYESL

SEQ ID NO: 1289 - protein, 6 aa, synthetic construct
  REGION 1..6: note = Description of Artificial Sequence: Syntheticpeptide
LKYFTI

SEQ ID NO: 1290 - protein, 6 aa, synthetic construct
  REGION 1..6: note = Description of Artificial Sequence: Syntheticpeptide
LKYHTV

SEQ ID NO: 1291 - protein, 6 aa, synthetic construct
  REGION 1..6: note = Description of Artificial Sequence: Syntheticpeptide
LKYILL

SEQ ID NO: 1292 - protein, 6 aa, synthetic construct
  REGION 1..6: note = Description of Artificial Sequence: Syntheticpeptide
LKYIPI

SEQ ID NO: 1293 - protein, 6 aa, synthetic construct
  REGION 1..6: note = Description of Artificial Sequence: Syntheticpeptide
LKYKHV

SEQ ID NO: 1294 - protein, 6 aa, synthetic construct
  REGION 1..6: note = Description of Artificial Sequence: Syntheticpeptide
LKYLYL

SEQ ID NO: 1295 - protein, 6 aa, synthetic construct
  REGION 1..6: note = Description of Artificial Sequence: Syntheticpeptide
LKYMEV

SEQ ID NO: 1296 - protein, 6 aa, synthetic construct
  REGION 1..6: note = Description of Artificial Sequence: Syntheticpeptide
LKYMTL

SEQ ID NO: 1297 - protein, 6 aa, synthetic construct
  REGION 1..6: note = Description of Artificial Sequence: Syntheticpeptide
LKYPAI

SEQ ID NO: 1298 - protein, 6 aa, synthetic construct
  REGION 1..6: note = Description of Artificial Sequence: Syntheticpeptide
LKYPDV

SEQ ID NO: 1299 - protein, 6 aa, synthetic construct
  REGION 1..6: note = Description of Artificial Sequence: Syntheticpeptide
LKYPEL

SEQ ID NO: 1300 - protein, 6 aa, synthetic construct
  REGION 1..6: note = Description of Artificial Sequence: Syntheticpeptide
LKYQPI

SEQ ID NO: 1301 - protein, 6 aa, synthetic construct
  REGION 1..6: note = Description of Artificial Sequence: Syntheticpeptide
LKYRGL

SEQ ID NO: 1302 - protein, 6 aa, synthetic construct
  REGION 1..6: note = Description of Artificial Sequence: Syntheticpeptide
LKYRLL

SEQ ID NO: 1303 - protein, 6 aa, synthetic construct
  REGION 1..6: note = Description of Artificial Sequence: Syntheticpeptide
LLYADL

SEQ ID NO: 1304 - protein, 6 aa, synthetic construct
  REGION 1..6: note = Description of Artificial Sequence: Syntheticpeptide
LLYAPL

SEQ ID NO: 1305 - protein, 6 aa, synthetic construct
  REGION 1..6: note = Description of Artificial Sequence: Syntheticpeptide
LLYAVV

SEQ ID NO: 1306 - protein, 6 aa, synthetic construct
  REGION 1..6: note = Description of Artificial Sequence: Syntheticpeptide
LLYCAI

SEQ ID NO: 1307 - protein, 6 aa, synthetic construct
  REGION 1..6: note = Description of Artificial Sequence: Syntheticpeptide
LLYEHV

SEQ ID NO: 1308 - protein, 6 aa, synthetic construct
  REGION 1..6: note = Description of Artificial Sequence: Syntheticpeptide
LLYELL

SEQ ID NO: 1309 - protein, 6 aa, synthetic construct
  REGION 1..6: note = Description of Artificial Sequence: Syntheticpeptide
LLYEQL

SEQ ID NO: 1310 - protein, 6 aa, synthetic construct
  REGION 1..6: note = Description of Artificial Sequence: Syntheticpeptide
LLYGQI

SEQ ID NO: 1311 - protein, 6 aa, synthetic construct
  REGION 1..6: note = Description of Artificial Sequence: Syntheticpeptide
LLYIRL

SEQ ID NO: 1312 - protein, 6 aa, synthetic construct
  REGION 1..6: note = Description of Artificial Sequence: Syntheticpeptide
LLYKAL

SEQ ID NO: 1313 - protein, 6 aa, synthetic construct
  REGION 1..6: note = Description of Artificial Sequence: Syntheticpeptide
LLYKFL

SEQ ID NO: 1314 - protein, 6 aa, synthetic construct
  REGION 1..6: note = Description of Artificial Sequence: Syntheticpeptide
LLYKLL

SEQ ID NO: 1315 - protein, 6 aa, synthetic construct
  REGION 1..6: note = Description of Artificial Sequence: Syntheticpeptide
LLYKTV

SEQ ID NO: 1316 - protein, 6 aa, synthetic construct
  REGION 1..6: note = Description of Artificial Sequence: Syntheticpeptide
LLYMVV

SEQ ID NO: 1317 - protein, 6 aa, synthetic construct
  REGION 1..6: note = Description of Artificial Sequence: Syntheticpeptide
LLYNAI

SEQ ID NO: 1318 - protein, 6 aa, synthetic construct
  REGION 1..6: note = Description of Artificial Sequence: Syntheticpeptide
LLYNIV

SEQ ID NO: 1319 - protein, 6 aa, synthetic construct
  REGION 1..6: note = Description of Artificial Sequence: Syntheticpeptide
LLYNVI

SEQ ID NO: 1320 - protein, 6 aa, synthetic construct
  REGION 1..6: note = Description of Artificial Sequence: Syntheticpeptide
LLYPAI

SEQ ID NO: 1321 - protein, 6 aa, synthetic construct
  REGION 1..6: note = Description of Artificial Sequence: Syntheticpeptide
LLYPLI

SEQ ID NO: 1322 - protein, 6 aa, synthetic construct
  REGION 1..6: note = Description of Artificial Sequence: Syntheticpeptide
LLYPNI

SEQ ID NO: 1323 - protein, 6 aa, synthetic construct
  REGION 1..6: note = Description of Artificial Sequence: Syntheticpeptide
LLYPSL

SEQ ID NO: 1324 - protein, 6 aa, synthetic construct
  REGION 1..6: note = Description of Artificial Sequence: Syntheticpeptide
LLYPTI

SEQ ID NO: 1325 - protein, 6 aa, synthetic construct
  REGION 1..6: note = Description of Artificial Sequence: Syntheticpeptide
LLYPVI

SEQ ID NO: 1326 - protein, 6 aa, synthetic construct
  REGION 1..6: note = Description of Artificial Sequence: Syntheticpeptide
LLYPVV

SEQ ID NO: 1327 - protein, 6 aa, synthetic construct
  REGION 1..6: note = Description of Artificial Sequence: Syntheticpeptide
LLYQIL

SEQ ID NO: 1328 - protein, 6 aa, synthetic construct
  REGION 1..6: note = Description of Artificial Sequence: Syntheticpeptide
LLYQNI

SEQ ID NO: 1329 - protein, 6 aa, synthetic construct
  REGION 1..6: note = Description of Artificial Sequence: Syntheticpeptide
LLYRLL

SEQ ID NO: 1330 - protein, 6 aa, synthetic construct
  REGION 1..6: note = Description of Artificial Sequence: Syntheticpeptide
LLYRVI

SEQ ID NO: 1331 - protein, 6 aa, synthetic construct
  REGION 1..6: note = Description of Artificial Sequence: Syntheticpeptide
LLYSII

SEQ ID NO: 1332 - protein, 6 aa, synthetic construct
  REGION 1..6: note = Description of Artificial Sequence: Syntheticpeptide
LLYSLI

SEQ ID NO: 1333 - protein, 6 aa, synthetic construct
  REGION 1..6: note = Description of Artificial Sequence: Syntheticpeptide
LLYSPV

SEQ ID NO: 1334 - protein, 6 aa, synthetic construct
  REGION 1..6: note = Description of Artificial Sequence: Syntheticpeptide
LLYSRL

SEQ ID NO: 1335 - protein, 6 aa, synthetic construct
  REGION 1..6: note = Description of Artificial Sequence: Syntheticpeptide
LLYSTI

SEQ ID NO: 1336 - protein, 6 aa, synthetic construct
  REGION 1..6: note = Description of Artificial Sequence: Syntheticpeptide
LLYSVI

SEQ ID NO: 1337 - protein, 6 aa, synthetic construct
  REGION 1..6: note = Description of Artificial Sequence: Syntheticpeptide
LLYSVV

SEQ ID NO: 1338 - protein, 6 aa, synthetic construct
  REGION 1..6: note = Description of Artificial Sequence: Syntheticpeptide
LLYTTI

SEQ ID NO: 1339 - protein, 6 aa, synthetic construct
  REGION 1..6: note = Description of Artificial Sequence: Syntheticpeptide
LLYTVI

SEQ ID NO: 1340 - protein, 6 aa, synthetic construct
  REGION 1..6: note = Description of Artificial Sequence: Syntheticpeptide
LLYTVV

SEQ ID NO: 1341 - protein, 6 aa, synthetic construct
  REGION 1..6: note = Description of Artificial Sequence: Syntheticpeptide
LLYVII

SEQ ID NO: 1342 - protein, 6 aa, synthetic construct
  REGION 1..6: note = Description of Artificial Sequence: Syntheticpeptide
LLYVIL

SEQ ID NO: 1343 - protein, 6 aa, synthetic construct
  REGION 1..6: note = Description of Artificial Sequence: Syntheticpeptide
LLYVTI

SEQ ID NO: 1344 - protein, 6 aa, synthetic construct
  REGION 1..6: note = Description of Artificial Sequence: Syntheticpeptide
LLYWGI

SEQ ID NO: 1345 - protein, 6 aa, synthetic construct
  REGION 1..6: note = Description of Artificial Sequence: Syntheticpeptide
LLYYLL

SEQ ID NO: 1346 - protein, 6 aa, synthetic construct
  REGION 1..6: note = Description of Artificial Sequence: Syntheticpeptide
LLYYVI

SEQ ID NO: 1347 - protein, 6 aa, synthetic construct
  REGION 1..6: note = Description of Artificial Sequence: Syntheticpeptide
LMYDNV

SEQ ID NO: 1348 - protein, 6 aa, synthetic construct
  REGION 1..6: note = Description of Artificial Sequence: Syntheticpeptide
LMYMVV

SEQ ID NO: 1349 - protein, 6 aa, synthetic construct
  REGION 1..6: note = Description of Artificial Sequence: Syntheticpeptide
LMYQEL

SEQ ID NO: 1350 - protein, 6 aa, synthetic construct
  REGION 1..6: note = Description of Artificial Sequence: Syntheticpeptide
LMYRGI

SEQ ID NO: 1351 - protein, 6 aa, synthetic construct
  REGION 1..6: note = Description of Artificial Sequence: Syntheticpeptide
LNYACL

SEQ ID NO: 1352 - protein, 6 aa, synthetic construct
  REGION 1..6: note = Description of Artificial Sequence: Syntheticpeptide
LNYATI

SEQ ID NO: 1353 - protein, 6 aa, synthetic construct
  REGION 1..6: note = Description of Artificial Sequence: Syntheticpeptide
LNYEVI

SEQ ID NO: 1354 - protein, 6 aa, synthetic construct
  REGION 1..6: note = Description of Artificial Sequence: Syntheticpeptide
LNYGDL

SEQ ID NO: 1355 - protein, 6 aa, synthetic construct
  REGION 1..6: note = Description of Artificial Sequence: Syntheticpeptide
LNYHKL

SEQ ID NO: 1356 - protein, 6 aa, synthetic construct
  REGION 1..6: note = Description of Artificial Sequence: Syntheticpeptide
LNYMVL

SEQ ID NO: 1357 - protein, 6 aa, synthetic construct
  REGION 1..6: note = Description of Artificial Sequence: Syntheticpeptide
LNYNIV

SEQ ID NO: 1358 - protein, 6 aa, synthetic construct
  REGION 1..6: note = Description of Artificial Sequence: Syntheticpeptide
LNYPVI

SEQ ID NO: 1359 - protein, 6 aa, synthetic construct
  REGION 1..6: note = Description of Artificial Sequence: Syntheticpeptide
LNYQMI

SEQ ID NO: 1360 - protein, 6 aa, synthetic construct
  REGION 1..6: note = Description of Artificial Sequence: Syntheticpeptide
LNYSGV

SEQ ID NO: 1361 - protein, 6 aa, synthetic construct
  REGION 1..6: note = Description of Artificial Sequence: Syntheticpeptide
LNYSVI

SEQ ID NO: 1362 - protein, 6 aa, synthetic construct
  REGION 1..6: note = Description of Artificial Sequence: Syntheticpeptide
LNYTIL

SEQ ID NO: 1363 - protein, 6 aa, synthetic construct
  REGION 1..6: note = Description of Artificial Sequence: Syntheticpeptide
LNYTTI

SEQ ID NO: 1364 - protein, 6 aa, synthetic construct
  REGION 1..6: note = Description of Artificial Sequence: Syntheticpeptide
LNYVPI

SEQ ID NO: 1365 - protein, 6 aa, synthetic construct
  REGION 1..6: note = Description of Artificial Sequence: Syntheticpeptide
LPYADL

SEQ ID NO: 1366 - protein, 6 aa, synthetic construct
  REGION 1..6: note = Description of Artificial Sequence: Syntheticpeptide
LPYALL

SEQ ID NO: 1367 - protein, 6 aa, synthetic construct
  REGION 1..6: note = Description of Artificial Sequence: Syntheticpeptide
LPYFNI

SEQ ID NO: 1368 - protein, 6 aa, synthetic construct
  REGION 1..6: note = Description of Artificial Sequence: Syntheticpeptide
LPYFNV

SEQ ID NO: 1369 - protein, 6 aa, synthetic construct
  REGION 1..6: note = Description of Artificial Sequence: Syntheticpeptide
LPYHDL

SEQ ID NO: 1370 - protein, 6 aa, synthetic construct
  REGION 1..6: note = Description of Artificial Sequence: Syntheticpeptide
LPYKLI

SEQ ID NO: 1371 - protein, 6 aa, synthetic construct
  REGION 1..6: note = Description of Artificial Sequence: Syntheticpeptide
LPYKTL

SEQ ID NO: 1372 - protein, 6 aa, synthetic construct
  REGION 1..6: note = Description of Artificial Sequence: Syntheticpeptide
LPYLGV

SEQ ID NO: 1373 - protein, 6 aa, synthetic construct
  REGION 1..6: note = Description of Artificial Sequence: Syntheticpeptide
LPYLKV

SEQ ID NO: 1374 - protein, 6 aa, synthetic construct
  REGION 1..6: note = Description of Artificial Sequence: Syntheticpeptide
LPYPAL

SEQ ID NO: 1375 - protein, 6 aa, synthetic construct
  REGION 1..6: note = Description of Artificial Sequence: Syntheticpeptide
LPYQVV

SEQ ID NO: 1376 - protein, 6 aa, synthetic construct
  REGION 1..6: note = Description of Artificial Sequence: Syntheticpeptide
LPYRTV

SEQ ID NO: 1377 - protein, 6 aa, synthetic construct
  REGION 1..6: note = Description of Artificial Sequence: Syntheticpeptide
LPYVEI

SEQ ID NO: 1378 - protein, 6 aa, synthetic construct
  REGION 1..6: note = Description of Artificial Sequence: Syntheticpeptide
LPYYDL

SEQ ID NO: 1379 - protein, 6 aa, synthetic construct
  REGION 1..6: note = Description of Artificial Sequence: Syntheticpeptide
LQYASL

SEQ ID NO: 1380 - protein, 6 aa, synthetic construct
  REGION 1..6: note = Description of Artificial Sequence: Syntheticpeptide
LQYERI

SEQ ID NO: 1381 - protein, 6 aa, synthetic construct
  REGION 1..6: note = Description of Artificial Sequence: Syntheticpeptide
LQYFAV

SEQ ID NO: 1382 - protein, 6 aa, synthetic construct
  REGION 1..6: note = Description of Artificial Sequence: Syntheticpeptide
LQYFSI

SEQ ID NO: 1383 - protein, 6 aa, synthetic construct
  REGION 1..6: note = Description of Artificial Sequence: Syntheticpeptide
LQYHNI

SEQ ID NO: 1384 - protein, 6 aa, synthetic construct
  REGION 1..6: note = Description of Artificial Sequence: Syntheticpeptide
LQYIGL

SEQ ID NO: 1385 - protein, 6 aa, synthetic construct
  REGION 1..6: note = Description of Artificial Sequence: Syntheticpeptide
LQYIKI

SEQ ID NO: 1386 - protein, 6 aa, synthetic construct
  REGION 1..6: note = Description of Artificial Sequence: Syntheticpeptide
LQYLSL

SEQ ID NO: 1387 - protein, 6 aa, synthetic construct
  REGION 1..6: note = Description of Artificial Sequence: Syntheticpeptide
LQYMIV

SEQ ID NO: 1388 - protein, 6 aa, synthetic construct
  REGION 1..6: note = Description of Artificial Sequence: Syntheticpeptide
LQYPAI

SEQ ID NO: 1389 - protein, 6 aa, synthetic construct
  REGION 1..6: note = Description of Artificial Sequence: Syntheticpeptide
LQYPLL

SEQ ID NO: 1390 - protein, 6 aa, synthetic construct
  REGION 1..6: note = Description of Artificial Sequence: Syntheticpeptide
LQYPLV

SEQ ID NO: 1391 - protein, 6 aa, synthetic construct
  REGION 1..6: note = Description of Artificial Sequence: Syntheticpeptide
LQYPSI

SEQ ID NO: 1392 - protein, 6 aa, synthetic construct
  REGION 1..6: note = Description of Artificial Sequence: Syntheticpeptide
LQYPTL

SEQ ID NO: 1393 - protein, 6 aa, synthetic construct
  REGION 1..6: note = Description of Artificial Sequence: Syntheticpeptide
LQYPVL

SEQ ID NO: 1394 - protein, 6 aa, synthetic construct
  REGION 1..6: note = Description of Artificial Sequence: Syntheticpeptide
LQYRAV

SEQ ID NO: 1395 - protein, 6 aa, synthetic construct
  REGION 1..6: note = Description of Artificial Sequence: Syntheticpeptide
LQYSAI

SEQ ID NO: 1396 - protein, 6 aa, synthetic construct
  REGION 1..6: note = Description of Artificial Sequence: Syntheticpeptide
LQYSSI

SEQ ID NO: 1397 - protein, 6 aa, synthetic construct
  REGION 1..6: note = Description of Artificial Sequence: Syntheticpeptide
LQYSVI

SEQ ID NO: 1398 - protein, 6 aa, synthetic construct
  REGION 1..6: note = Description of Artificial Sequence: Syntheticpeptide
LQYTIL

SEQ ID NO: 1399 - protein, 6 aa, synthetic construct
  REGION 1..6: note = Description of Artificial Sequence: Syntheticpeptide
LQYTLI

SEQ ID NO: 1400 - protein, 6 aa, synthetic construct
  REGION 1..6: note = Description of Artificial Sequence: Syntheticpeptide
LQYTMI

SEQ ID NO: 1401 - protein, 6 aa, synthetic construct
  REGION 1..6: note = Description of Artificial Sequence: Syntheticpeptide
LQYYQV

SEQ ID NO: 1402 - protein, 6 aa, synthetic construct
  REGION 1..6: note = Description of Artificial Sequence: Syntheticpeptide
LRYAAV

SEQ ID NO: 1403 - protein, 6 aa, synthetic construct
  REGION 1..6: note = Description of Artificial Sequence: Syntheticpeptide
LRYAGL

SEQ ID NO: 1404 - protein, 6 aa, synthetic construct
  REGION 1..6: note = Description of Artificial Sequence: Syntheticpeptide
LRYAPL

SEQ ID NO: 1405 - protein, 6 aa, synthetic construct
  REGION 1..6: note = Description of Artificial Sequence: Syntheticpeptide
LRYASI

SEQ ID NO: 1406 - protein, 6 aa, synthetic construct
  REGION 1..6: note = Description of Artificial Sequence: Syntheticpeptide
LRYATI

SEQ ID NO: 1407 - protein, 6 aa, synthetic construct
  REGION 1..6: note = Description of Artificial Sequence: Syntheticpeptide
LRYATV

SEQ ID NO: 1408 - protein, 6 aa, synthetic construct
  REGION 1..6: note = Description of Artificial Sequence: Syntheticpeptide
LRYAVL

SEQ ID NO: 1409 - protein, 6 aa, synthetic construct
  REGION 1..6: note = Description of Artificial Sequence: Syntheticpeptide
LRYCGI

SEQ ID NO: 1410 - protein, 6 aa, synthetic construct
  REGION 1..6: note = Description of Artificial Sequence: Syntheticpeptide
LRYELL

SEQ ID NO: 1411 - protein, 6 aa, synthetic construct
  REGION 1..6: note = Description of Artificial Sequence: Syntheticpeptide
LRYETL

SEQ ID NO: 1412 - protein, 6 aa, synthetic construct
  REGION 1..6: note = Description of Artificial Sequence: Syntheticpeptide
LRYGAL

SEQ ID NO: 1413 - protein, 6 aa, synthetic construct
  REGION 1..6: note = Description of Artificial Sequence: Syntheticpeptide
LRYGPI

SEQ ID NO: 1414 - protein, 6 aa, synthetic construct
  REGION 1..6: note = Description of Artificial Sequence: Syntheticpeptide
LRYGTL

SEQ ID NO: 1415 - protein, 6 aa, synthetic construct
  REGION 1..6: note = Description of Artificial Sequence: Syntheticpeptide
LRYHHI

SEQ ID NO: 1416 - protein, 6 aa, synthetic construct
  REGION 1..6: note = Description of Artificial Sequence: Syntheticpeptide
LRYHSI

SEQ ID NO: 1417 - protein, 6 aa, synthetic construct
  REGION 1..6: note = Description of Artificial Sequence: Syntheticpeptide
LRYHVL

SEQ ID NO: 1418 - protein, 6 aa, synthetic construct
  REGION 1..6: note = Description of Artificial Sequence: Syntheticpeptide
LRYIAI

SEQ ID NO: 1419 - protein, 6 aa, synthetic construct
  REGION 1..6: note = Description of Artificial Sequence: Syntheticpeptide
LRYIFV

SEQ ID NO: 1420 - protein, 6 aa, synthetic construct
  REGION 1..6: note = Description of Artificial Sequence: Syntheticpeptide
LRYITV

SEQ ID NO: 1421 - protein, 6 aa, synthetic construct
  REGION 1..6: note = Description of Artificial Sequence: Syntheticpeptide
LRYKEV

SEQ ID NO: 1422 - protein, 6 aa, synthetic construct
  REGION 1..6: note = Description of Artificial Sequence: Syntheticpeptide
LRYKKL

SEQ ID NO: 1423 - protein, 6 aa, synthetic construct
  REGION 1..6: note = Description of Artificial Sequence: Syntheticpeptide
LRYKMV

SEQ ID NO: 1424 - protein, 6 aa, synthetic construct
  REGION 1..6: note = Description of Artificial Sequence: Syntheticpeptide
LRYKSL

SEQ ID NO: 1425 - protein, 6 aa, synthetic construct
  REGION 1..6: note = Description of Artificial Sequence: Syntheticpeptide
LRYKVI

SEQ ID NO: 1426 - protein, 6 aa, synthetic construct
  REGION 1..6: note = Description of Artificial Sequence: Syntheticpeptide
LRYLAI

SEQ ID NO: 1427 - protein, 6 aa, synthetic construct
  REGION 1..6: note = Description of Artificial Sequence: Syntheticpeptide
LRYLDL

SEQ ID NO: 1428 - protein, 6 aa, synthetic construct
  REGION 1..6: note = Description of Artificial Sequence: Syntheticpeptide
LRYLTI

SEQ ID NO: 1429 - protein, 6 aa, synthetic construct
  REGION 1..6: note = Description of Artificial Sequence: Syntheticpeptide
LRYLTV

SEQ ID NO: 1430 - protein, 6 aa, synthetic construct
  REGION 1..6: note = Description of Artificial Sequence: Syntheticpeptide
LRYMSI

SEQ ID NO: 1431 - protein, 6 aa, synthetic construct
  REGION 1..6: note = Description of Artificial Sequence: Syntheticpeptide
LRYMVI

SEQ ID NO: 1432 - protein, 6 aa, synthetic construct
  REGION 1..6: note = Description of Artificial Sequence: Syntheticpeptide
LRYNCI

SEQ ID NO: 1433 - protein, 6 aa, synthetic construct
  REGION 1..6: note = Description of Artificial Sequence: Syntheticpeptide
LRYNGL

SEQ ID NO: 1434 - protein, 6 aa, synthetic construct
  REGION 1..6: note = Description of Artificial Sequence: Syntheticpeptide
LRYNII

SEQ ID NO: 1435 - protein, 6 aa, synthetic construct
  REGION 1..6: note = Description of Artificial Sequence: Syntheticpeptide
LRYNIL

SEQ ID NO: 1436 - protein, 6 aa, synthetic construct
  REGION 1..6: note = Description of Artificial Sequence: Syntheticpeptide
LRYNKI

SEQ ID NO: 1437 - protein, 6 aa, synthetic construct
  REGION 1..6: note = Description of Artificial Sequence: Syntheticpeptide
LRYNSL

SEQ ID NO: 1438 - protein, 6 aa, synthetic construct
  REGION 1..6: note = Description of Artificial Sequence: Syntheticpeptide
LRYNVI

SEQ ID NO: 1439 - protein, 6 aa, synthetic construct
  REGION 1..6: note = Description of Artificial Sequence: Syntheticpeptide
LRYNVL

SEQ ID NO: 1440 - protein, 6 aa, synthetic construct
  REGION 1..6: note = Description of Artificial Sequence: Syntheticpeptide
LRYPFL

SEQ ID NO: 1441 - protein, 6 aa, synthetic construct
  REGION 1..6: note = Description of Artificial Sequence: Syntheticpeptide
LRYPII

SEQ ID NO: 1442 - protein, 6 aa, synthetic construct
  REGION 1..6: note = Description of Artificial Sequence: Syntheticpeptide
LRYPIL

SEQ ID NO: 1443 - protein, 6 aa, synthetic construct
  REGION 1..6: note = Description of Artificial Sequence: Syntheticpeptide
LRYPLL

SEQ ID NO: 1444 - protein, 6 aa, synthetic construct
  REGION 1..6: note = Description of Artificial Sequence: Syntheticpeptide
LRYPNI

SEQ ID NO: 1445 - protein, 6 aa, synthetic construct
  REGION 1..6: note = Description of Artificial Sequence: Syntheticpeptide
LRYPSI

SEQ ID NO: 1446 - protein, 6 aa, synthetic construct
  REGION 1..6: note = Description of Artificial Sequence: Syntheticpeptide
LRYPTI

SEQ ID NO: 1447 - protein, 6 aa, synthetic construct
  REGION 1..6: note = Description of Artificial Sequence: Syntheticpeptide
LRYPTL

SEQ ID NO: 1448 - protein, 6 aa, synthetic construct
  REGION 1..6: note = Description of Artificial Sequence: Syntheticpeptide
LRYPVI

SEQ ID NO: 1449 - protein, 6 aa, synthetic construct
  REGION 1..6: note = Description of Artificial Sequence: Syntheticpeptide
LRYPVL

SEQ ID NO: 1450 - protein, 6 aa, synthetic construct
  REGION 1..6: note = Description of Artificial Sequence: Syntheticpeptide
LRYQKL

SEQ ID NO: 1451 - protein, 6 aa, synthetic construct
  REGION 1..6: note = Description of Artificial Sequence: Syntheticpeptide
LRYQMI

SEQ ID NO: 1452 - protein, 6 aa, synthetic construct
  REGION 1..6: note = Description of Artificial Sequence: Syntheticpeptide
LRYQNL

SEQ ID NO: 1453 - protein, 6 aa, synthetic construct
  REGION 1..6: note = Description of Artificial Sequence: Syntheticpeptide
LRYRLI

SEQ ID NO: 1454 - protein, 6 aa, synthetic construct
  REGION 1..6: note = Description of Artificial Sequence: Syntheticpeptide
LRYRVI

SEQ ID NO: 1455 - protein, 6 aa, synthetic construct
  REGION 1..6: note = Description of Artificial Sequence: Syntheticpeptide
LRYSAI

SEQ ID NO: 1456 - protein, 6 aa, synthetic construct
  REGION 1..6: note = Description of Artificial Sequence: Syntheticpeptide
LRYSDL

SEQ ID NO: 1457 - protein, 6 aa, synthetic construct
  REGION 1..6: note = Description of Artificial Sequence: Syntheticpeptide
LRYSII

SEQ ID NO: 1458 - protein, 6 aa, synthetic construct
  REGION 1..6: note = Description of Artificial Sequence: Syntheticpeptide
LRYSMI

SEQ ID NO: 1459 - protein, 6 aa, synthetic construct
  REGION 1..6: note = Description of Artificial Sequence: Syntheticpeptide
LRYSSI

SEQ ID NO: 1460 - protein, 6 aa, synthetic construct
  REGION 1..6: note = Description of Artificial Sequence: Syntheticpeptide
LRYSTI

SEQ ID NO: 1461 - protein, 6 aa, synthetic construct
  REGION 1..6: note = Description of Artificial Sequence: Syntheticpeptide
LRYSTL

SEQ ID NO: 1462 - protein, 6 aa, synthetic construct
  REGION 1..6: note = Description of Artificial Sequence: Syntheticpeptide
LRYSVI

SEQ ID NO: 1463 - protein, 6 aa, synthetic construct
  REGION 1..6: note = Description of Artificial Sequence: Syntheticpeptide
LRYSVL

SEQ ID NO: 1464 - protein, 6 aa, synthetic construct
  REGION 1..6: note = Description of Artificial Sequence: Syntheticpeptide
LRYSVV

SEQ ID NO: 1465 - protein, 6 aa, synthetic construct
  REGION 1..6: note = Description of Artificial Sequence: Syntheticpeptide
LRYTAI

SEQ ID NO: 1466 - protein, 6 aa, synthetic construct
  REGION 1..6: note = Description of Artificial Sequence: Syntheticpeptide
LRYTIL

SEQ ID NO: 1467 - protein, 6 aa, synthetic construct
  REGION 1..6: note = Description of Artificial Sequence: Syntheticpeptide
LRYTLI

SEQ ID NO: 1468 - protein, 6 aa, synthetic construct
  REGION 1..6: note = Description of Artificial Sequence: Syntheticpeptide
LRYTMI

SEQ ID NO: 1469 - protein, 6 aa, synthetic construct
  REGION 1..6: note = Description of Artificial Sequence: Syntheticpeptide
LRYTNL

SEQ ID NO: 1470 - protein, 6 aa, synthetic construct
  REGION 1..6: note = Description of Artificial Sequence: Syntheticpeptide
LRYTPV

SEQ ID NO: 1471 - protein, 6 aa, synthetic construct
  REGION 1..6: note = Description of Artificial Sequence: Syntheticpeptide
LRYTSI

SEQ ID NO: 1472 - protein, 6 aa, synthetic construct
  REGION 1..6: note = Description of Artificial Sequence: Syntheticpeptide
LRYTSV

SEQ ID NO: 1473 - protein, 6 aa, synthetic construct
  REGION 1..6: note = Description of Artificial Sequence: Syntheticpeptide
LRYTTI

SEQ ID NO: 1474 - protein, 6 aa, synthetic construct
  REGION 1..6: note = Description of Artificial Sequence: Syntheticpeptide
LRYTTV

SEQ ID NO: 1475 - protein, 6 aa, synthetic construct
  REGION 1..6: note = Description of Artificial Sequence: Syntheticpeptide
LRYTVI

SEQ ID NO: 1476 - protein, 6 aa, synthetic construct
  REGION 1..6: note = Description of Artificial Sequence: Syntheticpeptide
LRYVEV

SEQ ID NO: 1477 - protein, 6 aa, synthetic construct
  REGION 1..6: note = Description of Artificial Sequence: Syntheticpeptide
LRYVTI

SEQ ID NO: 1478 - protein, 6 aa, synthetic construct
  REGION 1..6: note = Description of Artificial Sequence: Syntheticpeptide
LRYVTV

SEQ ID NO: 1479 - protein, 6 aa, synthetic construct
  REGION 1..6: note = Description of Artificial Sequence: Syntheticpeptide
LSYDSL

SEQ ID NO: 1480 - protein, 6 aa, synthetic construct
  REGION 1..6: note = Description of Artificial Sequence: Syntheticpeptide
LSYEDV

SEQ ID NO: 1481 - protein, 6 aa, synthetic construct
  REGION 1..6: note = Description of Artificial Sequence: Syntheticpeptide
LSYFGV

SEQ ID NO: 1482 - protein, 6 aa, synthetic construct
  REGION 1..6: note = Description of Artificial Sequence: Syntheticpeptide
LSYILI

SEQ ID NO: 1483 - protein, 6 aa, synthetic construct
  REGION 1..6: note = Description of Artificial Sequence: Syntheticpeptide
LSYISV

SEQ ID NO: 1484 - protein, 6 aa, synthetic construct
  REGION 1..6: note = Description of Artificial Sequence: Syntheticpeptide
LSYKQV

SEQ ID NO: 1485 - protein, 6 aa, synthetic construct
  REGION 1..6: note = Description of Artificial Sequence: Syntheticpeptide
LSYKRL

SEQ ID NO: 1486 - protein, 6 aa, synthetic construct
  REGION 1..6: note = Description of Artificial Sequence: Syntheticpeptide
LSYLDV

SEQ ID NO: 1487 - protein, 6 aa, synthetic construct
  REGION 1..6: note = Description of Artificial Sequence: Syntheticpeptide
LSYMDL

SEQ ID NO: 1488 - protein, 6 aa, synthetic construct
  REGION 1..6: note = Description of Artificial Sequence: Syntheticpeptide
LSYNAL

SEQ ID NO: 1489 - protein, 6 aa, synthetic construct
  REGION 1..6: note = Description of Artificial Sequence: Syntheticpeptide
LSYNDL

SEQ ID NO: 1490 - protein, 6 aa, synthetic construct
  REGION 1..6: note = Description of Artificial Sequence: Syntheticpeptide
LSYNKL

SEQ ID NO: 1491 - protein, 6 aa, synthetic construct
  REGION 1..6: note = Description of Artificial Sequence: Syntheticpeptide
LSYNQL

SEQ ID NO: 1492 - protein, 6 aa, synthetic construct
  REGION 1..6: note = Description of Artificial Sequence: Syntheticpeptide
LSYPVL

SEQ ID NO: 1493 - protein, 6 aa, synthetic construct
  REGION 1..6: note = Description of Artificial Sequence: Syntheticpeptide
LSYQEV

SEQ ID NO: 1494 - protein, 6 aa, synthetic construct
  REGION 1..6: note = Description of Artificial Sequence: Syntheticpeptide
LSYQPV

SEQ ID NO: 1495 - protein, 6 aa, synthetic construct
  REGION 1..6: note = Description of Artificial Sequence: Syntheticpeptide
LSYQTI

SEQ ID NO: 1496 - protein, 6 aa, synthetic construct
  REGION 1..6: note = Description of Artificial Sequence: Syntheticpeptide
LSYRSL

SEQ ID NO: 1497 - protein, 6 aa, synthetic construct
  REGION 1..6: note = Description of Artificial Sequence: Syntheticpeptide
LSYRSV

SEQ ID NO: 1498 - protein, 6 aa, synthetic construct
  REGION 1..6: note = Description of Artificial Sequence: Syntheticpeptide
LSYSII

SEQ ID NO: 1499 - protein, 6 aa, synthetic construct
  REGION 1..6: note = Description of Artificial Sequence: Syntheticpeptide
LSYSSL

SEQ ID NO: 1500 - protein, 6 aa, synthetic construct
  REGION 1..6: note = Description of Artificial Sequence: Syntheticpeptide
LSYSTL

SEQ ID NO: 1501 - protein, 6 aa, synthetic construct
  REGION 1..6: note = Description of Artificial Sequence: Syntheticpeptide
LSYTKV

SEQ ID NO: 1502 - protein, 6 aa, synthetic construct
  REGION 1..6: note = Description of Artificial Sequence: Syntheticpeptide
LSYTSI

SEQ ID NO: 1503 - protein, 6 aa, synthetic construct
  REGION 1..6: note = Description of Artificial Sequence: Syntheticpeptide
LSYTTI

SEQ ID NO: 1504 - protein, 6 aa, synthetic construct
  REGION 1..6: note = Description of Artificial Sequence: Syntheticpeptide
LSYVLI

SEQ ID NO: 1505 - protein, 6 aa, synthetic construct
  REGION 1..6: note = Description of Artificial Sequence: Syntheticpeptide
LTYADL

SEQ ID NO: 1506 - protein, 6 aa, synthetic construct
  REGION 1..6: note = Description of Artificial Sequence: Syntheticpeptide
LTYAEL

SEQ ID NO: 1507 - protein, 6 aa, synthetic construct
  REGION 1..6: note = Description of Artificial Sequence: Syntheticpeptide
LTYAQV

SEQ ID NO: 1508 - protein, 6 aa, synthetic construct
  REGION 1..6: note = Description of Artificial Sequence: Syntheticpeptide
LTYARL

SEQ ID NO: 1509 - protein, 6 aa, synthetic construct
  REGION 1..6: note = Description of Artificial Sequence: Syntheticpeptide
LTYCDL

SEQ ID NO: 1510 - protein, 6 aa, synthetic construct
  REGION 1..6: note = Description of Artificial Sequence: Syntheticpeptide
LTYCGL

SEQ ID NO: 1511 - protein, 6 aa, synthetic construct
  REGION 1..6: note = Description of Artificial Sequence: Syntheticpeptide
LTYCVL

SEQ ID NO: 1512 - protein, 6 aa, synthetic construct
  REGION 1..6: note = Description of Artificial Sequence: Syntheticpeptide
LTYEEL

SEQ ID NO: 1513 - protein, 6 aa, synthetic construct
  REGION 1..6: note = Description of Artificial Sequence: Syntheticpeptide
LTYEFL

SEQ ID NO: 1514 - protein, 6 aa, synthetic construct
  REGION 1..6: note = Description of Artificial Sequence: Syntheticpeptide
LTYGEV

SEQ ID NO: 1515 - protein, 6 aa, synthetic construct
  REGION 1..6: note = Description of Artificial Sequence: Syntheticpeptide
LTYGRL

SEQ ID NO: 1516 - protein, 6 aa, synthetic construct
  REGION 1..6: note = Description of Artificial Sequence: Syntheticpeptide
LTYKAL

SEQ ID NO: 1517 - protein, 6 aa, synthetic construct
  REGION 1..6: note = Description of Artificial Sequence: Syntheticpeptide
LTYLRL

SEQ ID NO: 1518 - protein, 6 aa, synthetic construct
  REGION 1..6: note = Description of Artificial Sequence: Syntheticpeptide
LTYMTL

SEQ ID NO: 1519 - protein, 6 aa, synthetic construct
  REGION 1..6: note = Description of Artificial Sequence: Syntheticpeptide
LTYNTL

SEQ ID NO: 1520 - protein, 6 aa, synthetic construct
  REGION 1..6: note = Description of Artificial Sequence: Syntheticpeptide
LTYPGI

SEQ ID NO: 1521 - protein, 6 aa, synthetic construct
  REGION 1..6: note = Description of Artificial Sequence: Syntheticpeptide
LTYQSV

SEQ ID NO: 1522 - protein, 6 aa, synthetic construct
  REGION 1..6: note = Description of Artificial Sequence: Syntheticpeptide
LTYSSV

SEQ ID NO: 1523 - protein, 6 aa, synthetic construct
  REGION 1..6: note = Description of Artificial Sequence: Syntheticpeptide
LTYTTV

SEQ ID NO: 1524 - protein, 6 aa, synthetic construct
  REGION 1..6: note = Description of Artificial Sequence: Syntheticpeptide
LVYDAI

SEQ ID NO: 1525 - protein, 6 aa, synthetic construct
  REGION 1..6: note = Description of Artificial Sequence: Syntheticpeptide
LVYDKL

SEQ ID NO: 1526 - protein, 6 aa, synthetic construct
  REGION 1..6: note = Description of Artificial Sequence: Syntheticpeptide
LVYDLV

SEQ ID NO: 1527 - protein, 6 aa, synthetic construct
  REGION 1..6: note = Description of Artificial Sequence: Syntheticpeptide
LVYENL

SEQ ID NO: 1528 - protein, 6 aa, synthetic construct
  REGION 1..6: note = Description of Artificial Sequence: Syntheticpeptide
LVYGQL

SEQ ID NO: 1529 - protein, 6 aa, synthetic construct
  REGION 1..6: note = Description of Artificial Sequence: Syntheticpeptide
LVYHKL

SEQ ID NO: 1530 - protein, 6 aa, synthetic construct
  REGION 1..6: note = Description of Artificial Sequence: Syntheticpeptide
LVYQEV

SEQ ID NO: 1531 - protein, 6 aa, synthetic construct
  REGION 1..6: note = Description of Artificial Sequence: Syntheticpeptide
LVYRKV

SEQ ID NO: 1532 - protein, 6 aa, synthetic construct
  REGION 1..6: note = Description of Artificial Sequence: Syntheticpeptide
LVYRNL

SEQ ID NO: 1533 - protein, 6 aa, synthetic construct
  REGION 1..6: note = Description of Artificial Sequence: Syntheticpeptide
LVYSEI

SEQ ID NO: 1534 - protein, 6 aa, synthetic construct
  REGION 1..6: note = Description of Artificial Sequence: Syntheticpeptide
LVYTNV

SEQ ID NO: 1535 - protein, 6 aa, synthetic construct
  REGION 1..6: note = Description of Artificial Sequence: Syntheticpeptide
LVYWEI

SEQ ID NO: 1536 - protein, 6 aa, synthetic construct
  REGION 1..6: note = Description of Artificial Sequence: Syntheticpeptide
LVYWKL

SEQ ID NO: 1537 - protein, 6 aa, synthetic construct
  REGION 1..6: note = Description of Artificial Sequence: Syntheticpeptide
LVYWRL

SEQ ID NO: 1538 - protein, 6 aa, synthetic construct
  REGION 1..6: note = Description of Artificial Sequence: Syntheticpeptide
LWYEGL

SEQ ID NO: 1539 - protein, 6 aa, synthetic construct
  REGION 1..6: note = Description of Artificial Sequence: Syntheticpeptide
LWYKYI

SEQ ID NO: 1540 - protein, 6 aa, synthetic construct
  REGION 1..6: note = Description of Artificial Sequence: Syntheticpeptide
LWYNHI

SEQ ID NO: 1541 - protein, 6 aa, synthetic construct
  REGION 1..6: note = Description of Artificial Sequence: Syntheticpeptide
LWYTMI

SEQ ID NO: 1542 - protein, 6 aa, synthetic construct
  REGION 1..6: note = Description of Artificial Sequence: Syntheticpeptide
LYYCQL

SEQ ID NO: 1543 - protein, 6 aa, synthetic construct
  REGION 1..6: note = Description of Artificial Sequence: Syntheticpeptide
LYYGDL

SEQ ID NO: 1544 - protein, 6 aa, synthetic construct
  REGION 1..6: note = Description of Artificial Sequence: Syntheticpeptide
LYYKKV

SEQ ID NO: 1545 - protein, 6 aa, synthetic construct
  REGION 1..6: note = Description of Artificial Sequence: Syntheticpeptide
LYYLLI

SEQ ID NO: 1546 - protein, 6 aa, synthetic construct
  REGION 1..6: note = Description of Artificial Sequence: Syntheticpeptide
LYYPKV

SEQ ID NO: 1547 - protein, 6 aa, synthetic construct
  REGION 1..6: note = Description of Artificial Sequence: Syntheticpeptide
LYYRRV

SEQ ID NO: 1548 - protein, 6 aa, synthetic construct
  REGION 1..6: note = Description of Artificial Sequence: Syntheticpeptide
LYYSTI

SEQ ID NO: 1549 - protein, 6 aa, synthetic construct
  REGION 1..6: note = Description of Artificial Sequence: Syntheticpeptide
LYYVRI

SEQ ID NO: 1550 - protein, 6 aa, synthetic construct
  REGION 1..6: note = Description of Artificial Sequence: Syntheticpeptide
LYYVVI

SEQ ID NO: 1551 - protein, 6 aa, synthetic construct
  REGION 1..6: note = Description of Artificial Sequence: Syntheticpeptide
SAYATL

SEQ ID NO: 1552 - protein, 6 aa, synthetic construct
  REGION 1..6: note = Description of Artificial Sequence: Syntheticpeptide
SAYCPL

SEQ ID NO: 1553 - protein, 6 aa, synthetic construct
  REGION 1..6: note = Description of Artificial Sequence: Syntheticpeptide
SAYPAL

SEQ ID NO: 1554 - protein, 6 aa, synthetic construct
  REGION 1..6: note = Description of Artificial Sequence: Syntheticpeptide
SAYQAL

SEQ ID NO: 1555 - protein, 6 aa, synthetic construct
  REGION 1..6: note = Description of Artificial Sequence: Syntheticpeptide
SAYQTI

SEQ ID NO: 1556 - protein, 6 aa, synthetic construct
  REGION 1..6: note = Description of Artificial Sequence: Syntheticpeptide
SAYRSV

SEQ ID NO: 1557 - protein, 6 aa, synthetic construct
  REGION 1..6: note = Description of Artificial Sequence: Syntheticpeptide
SAYTAL

SEQ ID NO: 1558 - protein, 6 aa, synthetic construct
  REGION 1..6: note = Description of Artificial Sequence: Syntheticpeptide
SAYTPL

SEQ ID NO: 1559 - protein, 6 aa, synthetic construct
  REGION 1..6: note = Description of Artificial Sequence: Syntheticpeptide
SAYVVL

SEQ ID NO: 1560 - protein, 6 aa, synthetic construct
  REGION 1..6: note = Description of Artificial Sequence: Syntheticpeptide
SCYAAV

SEQ ID NO: 1561 - protein, 6 aa, synthetic construct
  REGION 1..6: note = Description of Artificial Sequence: Syntheticpeptide
SCYCII

SEQ ID NO: 1562 - protein, 6 aa, synthetic construct
  REGION 1..6: note = Description of Artificial Sequence: Syntheticpeptide
SCYCLL

SEQ ID NO: 1563 - protein, 6 aa, synthetic construct
  REGION 1..6: note = Description of Artificial Sequence: Syntheticpeptide
SCYDFL

SEQ ID NO: 1564 - protein, 6 aa, synthetic construct
  REGION 1..6: note = Description of Artificial Sequence: Syntheticpeptide
SCYEEL

SEQ ID NO: 1565 - protein, 6 aa, synthetic construct
  REGION 1..6: note = Description of Artificial Sequence: Syntheticpeptide
SCYEKI

SEQ ID NO: 1566 - protein, 6 aa, synthetic construct
  REGION 1..6: note = Description of Artificial Sequence: Syntheticpeptide
SCYHIL

SEQ ID NO: 1567 - protein, 6 aa, synthetic construct
  REGION 1..6: note = Description of Artificial Sequence: Syntheticpeptide
SCYPYI

SEQ ID NO: 1568 - protein, 6 aa, synthetic construct
  REGION 1..6: note = Description of Artificial Sequence: Syntheticpeptide
SCYRIL

SEQ ID NO: 1569 - protein, 6 aa, synthetic construct
  REGION 1..6: note = Description of Artificial Sequence: Syntheticpeptide
SCYRTL

SEQ ID NO: 1570 - protein, 6 aa, synthetic construct
  REGION 1..6: note = Description of Artificial Sequence: Syntheticpeptide
SDYCNL

SEQ ID NO: 1571 - protein, 6 aa, synthetic construct
  REGION 1..6: note = Description of Artificial Sequence: Syntheticpeptide
SDYEDL

SEQ ID NO: 1572 - protein, 6 aa, synthetic construct
  REGION 1..6: note = Description of Artificial Sequence: Syntheticpeptide
SDYENV

SEQ ID NO: 1573 - protein, 6 aa, synthetic construct
  REGION 1..6: note = Description of Artificial Sequence: Syntheticpeptide
SDYESV

SEQ ID NO: 1574 - protein, 6 aa, synthetic construct
  REGION 1..6: note = Description of Artificial Sequence: Syntheticpeptide
SDYFIV

SEQ ID NO: 1575 - protein, 6 aa, synthetic construct
  REGION 1..6: note = Description of Artificial Sequence: Syntheticpeptide
SDYHTL

SEQ ID NO: 1576 - protein, 6 aa, synthetic construct
  REGION 1..6: note = Description of Artificial Sequence: Syntheticpeptide
SDYLAI

SEQ ID NO: 1577 - protein, 6 aa, synthetic construct
  REGION 1..6: note = Description of Artificial Sequence: Syntheticpeptide
SDYLDI

SEQ ID NO: 1578 - protein, 6 aa, synthetic construct
  REGION 1..6: note = Description of Artificial Sequence: Syntheticpeptide
SDYLEL

SEQ ID NO: 1579 - protein, 6 aa, synthetic construct
  REGION 1..6: note = Description of Artificial Sequence: Syntheticpeptide
SDYQDL

SEQ ID NO: 1580 - protein, 6 aa, synthetic construct
  REGION 1..6: note = Description of Artificial Sequence: Syntheticpeptide
SDYQRL

SEQ ID NO: 1581 - protein, 6 aa, synthetic construct
  REGION 1..6: note = Description of Artificial Sequence: Syntheticpeptide
SDYSVI

SEQ ID NO: 1582 - protein, 6 aa, synthetic construct
  REGION 1..6: note = Description of Artificial Sequence: Syntheticpeptide
SDYTHL

SEQ ID NO: 1583 - protein, 6 aa, synthetic construct
  REGION 1..6: note = Description of Artificial Sequence: Syntheticpeptide
SEYASV

SEQ ID NO: 1584 - protein, 6 aa, synthetic construct
  REGION 1..6: note = Description of Artificial Sequence: Syntheticpeptide
SEYEEL

SEQ ID NO: 1585 - protein, 6 aa, synthetic construct
  REGION 1..6: note = Description of Artificial Sequence: Syntheticpeptide
SEYFEL

SEQ ID NO: 1586 - protein, 6 aa, synthetic construct
  REGION 1..6: note = Description of Artificial Sequence: Syntheticpeptide
SEYGEL

SEQ ID NO: 1587 - protein, 6 aa, synthetic construct
  REGION 1..6: note = Description of Artificial Sequence: Syntheticpeptide
SEYITL

SEQ ID NO: 1588 - protein, 6 aa, synthetic construct
  REGION 1..6: note = Description of Artificial Sequence: Syntheticpeptide
SEYKAL

SEQ ID NO: 1589 - protein, 6 aa, synthetic construct
  REGION 1..6: note = Description of Artificial Sequence: Syntheticpeptide
SEYKEL

SEQ ID NO: 1590 - protein, 6 aa, synthetic construct
  REGION 1..6: note = Description of Artificial Sequence: Syntheticpeptide
SEYKGI

SEQ ID NO: 1591 - protein, 6 aa, synthetic construct
  REGION 1..6: note = Description of Artificial Sequence: Syntheticpeptide
SEYLAI

SEQ ID NO: 1592 - protein, 6 aa, synthetic construct
  REGION 1..6: note = Description of Artificial Sequence: Syntheticpeptide
SEYLEI

SEQ ID NO: 1593 - protein, 6 aa, synthetic construct
  REGION 1..6: note = Description of Artificial Sequence: Syntheticpeptide
SEYMVI

SEQ ID NO: 1594 - protein, 6 aa, synthetic construct
  REGION 1..6: note = Description of Artificial Sequence: Syntheticpeptide
SEYQSI

SEQ ID NO: 1595 - protein, 6 aa, synthetic construct
  REGION 1..6: note = Description of Artificial Sequence: Syntheticpeptide
SEYRPI

SEQ ID NO: 1596 - protein, 6 aa, synthetic construct
  REGION 1..6: note = Description of Artificial Sequence: Syntheticpeptide
SEYSEI

SEQ ID NO: 1597 - protein, 6 aa, synthetic construct
  REGION 1..6: note = Description of Artificial Sequence: Syntheticpeptide
SEYSSI

SEQ ID NO: 1598 - protein, 6 aa, synthetic construct
  REGION 1..6: note = Description of Artificial Sequence: Syntheticpeptide
SEYTPI

SEQ ID NO: 1599 - protein, 6 aa, synthetic construct
  REGION 1..6: note = Description of Artificial Sequence: Syntheticpeptide
SEYTYV

SEQ ID NO: 1600 - protein, 6 aa, synthetic construct
  REGION 1..6: note = Description of Artificial Sequence: Syntheticpeptide
SFYAAL

SEQ ID NO: 1601 - protein, 6 aa, synthetic construct
  REGION 1..6: note = Description of Artificial Sequence: Syntheticpeptide
SFYDSL

SEQ ID NO: 1602 - protein, 6 aa, synthetic construct
  REGION 1..6: note = Description of Artificial Sequence: Syntheticpeptide
SFYKGL

SEQ ID NO: 1603 - protein, 6 aa, synthetic construct
  REGION 1..6: note = Description of Artificial Sequence: Syntheticpeptide
SFYLYV

SEQ ID NO: 1604 - protein, 6 aa, synthetic construct
  REGION 1..6: note = Description of Artificial Sequence: Syntheticpeptide
SFYNAV

SEQ ID NO: 1605 - protein, 6 aa, synthetic construct
  REGION 1..6: note = Description of Artificial Sequence: Syntheticpeptide
SFYPSV

SEQ ID NO: 1606 - protein, 6 aa, synthetic construct
  REGION 1..6: note = Description of Artificial Sequence: Syntheticpeptide
SFYQQI

SEQ ID NO: 1607 - protein, 6 aa, synthetic construct
  REGION 1..6: note = Description of Artificial Sequence: Syntheticpeptide
SFYQQL

SEQ ID NO: 1608 - protein, 6 aa, synthetic construct
  REGION 1..6: note = Description of Artificial Sequence: Syntheticpeptide
SFYSAL

SEQ ID NO: 1609 - protein, 6 aa, synthetic construct
  REGION 1..6: note = Description of Artificial Sequence: Syntheticpeptide
SFYSDI

SEQ ID NO: 1610 - protein, 6 aa, synthetic construct
  REGION 1..6: note = Description of Artificial Sequence: Syntheticpeptide
SFYSKL

SEQ ID NO: 1611 - protein, 6 aa, synthetic construct
  REGION 1..6: note = Description of Artificial Sequence: Syntheticpeptide
SFYSRV

SEQ ID NO: 1612 - protein, 6 aa, synthetic construct
  REGION 1..6: note = Description of Artificial Sequence: Syntheticpeptide
SFYWNV

SEQ ID NO: 1613 - protein, 6 aa, synthetic construct
  REGION 1..6: note = Description of Artificial Sequence: Syntheticpeptide
SFYYLI

SEQ ID NO: 1614 - protein, 6 aa, synthetic construct
  REGION 1..6: note = Description of Artificial Sequence: Syntheticpeptide
SGYAQL

SEQ ID NO: 1615 - protein, 6 aa, synthetic construct
  REGION 1..6: note = Description of Artificial Sequence: Syntheticpeptide
SGYATL

SEQ ID NO: 1616 - protein, 6 aa, synthetic construct
  REGION 1..6: note = Description of Artificial Sequence: Syntheticpeptide
SGYEKL

SEQ ID NO: 1617 - protein, 6 aa, synthetic construct
  REGION 1..6: note = Description of Artificial Sequence: Syntheticpeptide
SGYQLV

SEQ ID NO: 1618 - protein, 6 aa, synthetic construct
  REGION 1..6: note = Description of Artificial Sequence: Syntheticpeptide
SGYQRI

SEQ ID NO: 1619 - protein, 6 aa, synthetic construct
  REGION 1..6: note = Description of Artificial Sequence: Syntheticpeptide
SGYRRL

SEQ ID NO: 1620 - protein, 6 aa, synthetic construct
  REGION 1..6: note = Description of Artificial Sequence: Syntheticpeptide
SGYSHL

SEQ ID NO: 1621 - protein, 6 aa, synthetic construct
  REGION 1..6: note = Description of Artificial Sequence: Syntheticpeptide
SGYSQL

SEQ ID NO: 1622 - protein, 6 aa, synthetic construct
  REGION 1..6: note = Description of Artificial Sequence: Syntheticpeptide
SGYTLI

SEQ ID NO: 1623 - protein, 6 aa, synthetic construct
  REGION 1..6: note = Description of Artificial Sequence: Syntheticpeptide
SGYTRI

SEQ ID NO: 1624 - protein, 6 aa, synthetic construct
  REGION 1..6: note = Description of Artificial Sequence: Syntheticpeptide
SGYYRV

SEQ ID NO: 1625 - protein, 6 aa, synthetic construct
  REGION 1..6: note = Description of Artificial Sequence: Syntheticpeptide
SHYADV

SEQ ID NO: 1626 - protein, 6 aa, synthetic construct
  REGION 1..6: note = Description of Artificial Sequence: Syntheticpeptide
SHYFPL

SEQ ID NO: 1627 - protein, 6 aa, synthetic construct
  REGION 1..6: note = Description of Artificial Sequence: Syntheticpeptide
SHYIDI

SEQ ID NO: 1628 - protein, 6 aa, synthetic construct
  REGION 1..6: note = Description of Artificial Sequence: Syntheticpeptide
SHYKRL

SEQ ID NO: 1629 - protein, 6 aa, synthetic construct
  REGION 1..6: note = Description of Artificial Sequence: Syntheticpeptide
SHYQVV

SEQ ID NO: 1630 - protein, 6 aa, synthetic construct
  REGION 1..6: note = Description of Artificial Sequence: Syntheticpeptide
SIYAPL

SEQ ID NO: 1631 - protein, 6 aa, synthetic construct
  REGION 1..6: note = Description of Artificial Sequence: Syntheticpeptide
SIYATL

SEQ ID NO: 1632 - protein, 6 aa, synthetic construct
  REGION 1..6: note = Description of Artificial Sequence: Syntheticpeptide
SIYEEL

SEQ ID NO: 1633 - protein, 6 aa, synthetic construct
  REGION 1..6: note = Description of Artificial Sequence: Syntheticpeptide
SIYEEV

SEQ ID NO: 1634 - protein, 6 aa, synthetic construct
  REGION 1..6: note = Description of Artificial Sequence: Syntheticpeptide
SIYELL

SEQ ID NO: 1635 - protein, 6 aa, synthetic construct
  REGION 1..6: note = Description of Artificial Sequence: Syntheticpeptide
SIYEVL

SEQ ID NO: 1636 - protein, 6 aa, synthetic construct
  REGION 1..6: note = Description of Artificial Sequence: Syntheticpeptide
SIYGDL

SEQ ID NO: 1637 - protein, 6 aa, synthetic construct
  REGION 1..6: note = Description of Artificial Sequence: Syntheticpeptide
SIYKKL

SEQ ID NO: 1638 - protein, 6 aa, synthetic construct
  REGION 1..6: note = Description of Artificial Sequence: Syntheticpeptide
SIYLNI

SEQ ID NO: 1639 - protein, 6 aa, synthetic construct
  REGION 1..6: note = Description of Artificial Sequence: Syntheticpeptide
SIYLVI

SEQ ID NO: 1640 - protein, 6 aa, synthetic construct
  REGION 1..6: note = Description of Artificial Sequence: Syntheticpeptide
SIYRYI

SEQ ID NO: 1641 - protein, 6 aa, synthetic construct
  REGION 1..6: note = Description of Artificial Sequence: Syntheticpeptide
SIYSWI

SEQ ID NO: 1642 - protein, 6 aa, synthetic construct
  REGION 1..6: note = Description of Artificial Sequence: Syntheticpeptide
SKYKEI

SEQ ID NO: 1643 - protein, 6 aa, synthetic construct
  REGION 1..6: note = Description of Artificial Sequence: Syntheticpeptide
SKYKIL

SEQ ID NO: 1644 - protein, 6 aa, synthetic construct
  REGION 1..6: note = Description of Artificial Sequence: Syntheticpeptide
SKYKSL

SEQ ID NO: 1645 - protein, 6 aa, synthetic construct
  REGION 1..6: note = Description of Artificial Sequence: Syntheticpeptide
SKYLAV

SEQ ID NO: 1646 - protein, 6 aa, synthetic construct
  REGION 1..6: note = Description of Artificial Sequence: Syntheticpeptide
SKYLGV

SEQ ID NO: 1647 - protein, 6 aa, synthetic construct
  REGION 1..6: note = Description of Artificial Sequence: Syntheticpeptide
SKYNIL

SEQ ID NO: 1648 - protein, 6 aa, synthetic construct
  REGION 1..6: note = Description of Artificial Sequence: Syntheticpeptide
SKYQAV

SEQ ID NO: 1649 - protein, 6 aa, synthetic construct
  REGION 1..6: note = Description of Artificial Sequence: Syntheticpeptide
SKYSDI

SEQ ID NO: 1650 - protein, 6 aa, synthetic construct
  REGION 1..6: note = Description of Artificial Sequence: Syntheticpeptide
SKYSSL

SEQ ID NO: 1651 - protein, 6 aa, synthetic construct
  REGION 1..6: note = Description of Artificial Sequence: Syntheticpeptide
SKYVGL

SEQ ID NO: 1652 - protein, 6 aa, synthetic construct
  REGION 1..6: note = Description of Artificial Sequence: Syntheticpeptide
SKYVSL

SEQ ID NO: 1653 - protein, 6 aa, synthetic construct
  REGION 1..6: note = Description of Artificial Sequence: Syntheticpeptide
SLYANI

SEQ ID NO: 1654 - protein, 6 aa, synthetic construct
  REGION 1..6: note = Description of Artificial Sequence: Syntheticpeptide
SLYAQV

SEQ ID NO: 1655 - protein, 6 aa, synthetic construct
  REGION 1..6: note = Description of Artificial Sequence: Syntheticpeptide
SLYAYI

SEQ ID NO: 1656 - protein, 6 aa, synthetic construct
  REGION 1..6: note = Description of Artificial Sequence: Syntheticpeptide
SLYDDL

SEQ ID NO: 1657 - protein, 6 aa, synthetic construct
  REGION 1..6: note = Description of Artificial Sequence: Syntheticpeptide
SLYDFL

SEQ ID NO: 1658 - protein, 6 aa, synthetic construct
  REGION 1..6: note = Description of Artificial Sequence: Syntheticpeptide
SLYDNL

SEQ ID NO: 1659 - protein, 6 aa, synthetic construct
  REGION 1..6: note = Description of Artificial Sequence: Syntheticpeptide
SLYDSI

SEQ ID NO: 1660 - protein, 6 aa, synthetic construct
  REGION 1..6: note = Description of Artificial Sequence: Syntheticpeptide
SLYDYL

SEQ ID NO: 1661 - protein, 6 aa, synthetic construct
  REGION 1..6: note = Description of Artificial Sequence: Syntheticpeptide
SLYEGL

SEQ ID NO: 1662 - protein, 6 aa, synthetic construct
  REGION 1..6: note = Description of Artificial Sequence: Syntheticpeptide
SLYEHI

SEQ ID NO: 1663 - protein, 6 aa, synthetic construct
  REGION 1..6: note = Description of Artificial Sequence: Syntheticpeptide
SLYELL

SEQ ID NO: 1664 - protein, 6 aa, synthetic construct
  REGION 1..6: note = Description of Artificial Sequence: Syntheticpeptide
SLYHCL

SEQ ID NO: 1665 - protein, 6 aa, synthetic construct
  REGION 1..6: note = Description of Artificial Sequence: Syntheticpeptide
SLYHKL

SEQ ID NO: 1666 - protein, 6 aa, synthetic construct
  REGION 1..6: note = Description of Artificial Sequence: Syntheticpeptide
SLYIGI

SEQ ID NO: 1667 - protein, 6 aa, synthetic construct
  REGION 1..6: note = Description of Artificial Sequence: Syntheticpeptide
SLYKKL

SEQ ID NO: 1668 - protein, 6 aa, synthetic construct
  REGION 1..6: note = Description of Artificial Sequence: Syntheticpeptide
SLYKNL

SEQ ID NO: 1669 - protein, 6 aa, synthetic construct
  REGION 1..6: note = Description of Artificial Sequence: Syntheticpeptide
SLYLAI

SEQ ID NO: 1670 - protein, 6 aa, synthetic construct
  REGION 1..6: note = Description of Artificial Sequence: Syntheticpeptide
SLYLGI

SEQ ID NO: 1671 - protein, 6 aa, synthetic construct
  REGION 1..6: note = Description of Artificial Sequence: Syntheticpeptide
SLYNAL

SEQ ID NO: 1672 - protein, 6 aa, synthetic construct
  REGION 1..6: note = Description of Artificial Sequence: Syntheticpeptide
SLYNLL

SEQ ID NO: 1673 - protein, 6 aa, synthetic construct
  REGION 1..6: note = Description of Artificial Sequence: Syntheticpeptide
SLYRNI

SEQ ID NO: 1674 - protein, 6 aa, synthetic construct
  REGION 1..6: note = Description of Artificial Sequence: Syntheticpeptide
SLYSDV

SEQ ID NO: 1675 - protein, 6 aa, synthetic construct
  REGION 1..6: note = Description of Artificial Sequence: Syntheticpeptide
SLYTCV

SEQ ID NO: 1676 - protein, 6 aa, synthetic construct
  REGION 1..6: note = Description of Artificial Sequence: Syntheticpeptide
SLYTTL

SEQ ID NO: 1677 - protein, 6 aa, synthetic construct
  REGION 1..6: note = Description of Artificial Sequence: Syntheticpeptide
SLYVAI

SEQ ID NO: 1678 - protein, 6 aa, synthetic construct
  REGION 1..6: note = Description of Artificial Sequence: Syntheticpeptide
SLYVDV

SEQ ID NO: 1679 - protein, 6 aa, synthetic construct
  REGION 1..6: note = Description of Artificial Sequence: Syntheticpeptide
SLYVSI

SEQ ID NO: 1680 - protein, 6 aa, synthetic construct
  REGION 1..6: note = Description of Artificial Sequence: Syntheticpeptide
SLYYAL

SEQ ID NO: 1681 - protein, 6 aa, synthetic construct
  REGION 1..6: note = Description of Artificial Sequence: Syntheticpeptide
SLYYNI

SEQ ID NO: 1682 - protein, 6 aa, synthetic construct
  REGION 1..6: note = Description of Artificial Sequence: Syntheticpeptide
SLYYPI

SEQ ID NO: 1683 - protein, 6 aa, synthetic construct
  REGION 1..6: note = Description of Artificial Sequence: Syntheticpeptide
SMYDGL

SEQ ID NO: 1684 - protein, 6 aa, synthetic construct
  REGION 1..6: note = Description of Artificial Sequence: Syntheticpeptide
SMYEDI

SEQ ID NO: 1685 - protein, 6 aa, synthetic construct
  REGION 1..6: note = Description of Artificial Sequence: Syntheticpeptide
SMYNEI

SEQ ID NO: 1686 - protein, 6 aa, synthetic construct
  REGION 1..6: note = Description of Artificial Sequence: Syntheticpeptide
SMYQSV

SEQ ID NO: 1687 - protein, 6 aa, synthetic construct
  REGION 1..6: note = Description of Artificial Sequence: Syntheticpeptide
SMYTWL

SEQ ID NO: 1688 - protein, 6 aa, synthetic construct
  REGION 1..6: note = Description of Artificial Sequence: Syntheticpeptide
SMYVSI

SEQ ID NO: 1689 - protein, 6 aa, synthetic construct
  REGION 1..6: note = Description of Artificial Sequence: Syntheticpeptide
SNYENL

SEQ ID NO: 1690 - protein, 6 aa, synthetic construct
  REGION 1..6: note = Description of Artificial Sequence: Syntheticpeptide
SNYGSL

SEQ ID NO: 1691 - protein, 6 aa, synthetic construct
  REGION 1..6: note = Description of Artificial Sequence: Syntheticpeptide
SNYGTI

SEQ ID NO: 1692 - protein, 6 aa, synthetic construct
  REGION 1..6: note = Description of Artificial Sequence: Syntheticpeptide
SNYLVL

SEQ ID NO: 1693 - protein, 6 aa, synthetic construct
  REGION 1..6: note = Description of Artificial Sequence: Syntheticpeptide
SNYQEI

SEQ ID NO: 1694 - protein, 6 aa, synthetic construct
  REGION 1..6: note = Description of Artificial Sequence: Syntheticpeptide
SNYRLL

SEQ ID NO: 1695 - protein, 6 aa, synthetic construct
  REGION 1..6: note = Description of Artificial Sequence: Syntheticpeptide
SNYRTL

SEQ ID NO: 1696 - protein, 6 aa, synthetic construct
  REGION 1..6: note = Description of Artificial Sequence: Syntheticpeptide
SNYSDI

SEQ ID NO: 1697 - protein, 6 aa, synthetic construct
  REGION 1..6: note = Description of Artificial Sequence: Syntheticpeptide
SNYSLL

SEQ ID NO: 1698 - protein, 6 aa, synthetic construct
  REGION 1..6: note = Description of Artificial Sequence: Syntheticpeptide
SPYAEI

SEQ ID NO: 1699 - protein, 6 aa, synthetic construct
  REGION 1..6: note = Description of Artificial Sequence: Syntheticpeptide
SPYATL

SEQ ID NO: 1700 - protein, 6 aa, synthetic construct
  REGION 1..6: note = Description of Artificial Sequence: Syntheticpeptide
SPYEKV

SEQ ID NO: 1701 - protein, 6 aa, synthetic construct
  REGION 1..6: note = Description of Artificial Sequence: Syntheticpeptide
SPYGDI

SEQ ID NO: 1702 - protein, 6 aa, synthetic construct
  REGION 1..6: note = Description of Artificial Sequence: Syntheticpeptide
SPYGGL

SEQ ID NO: 1703 - protein, 6 aa, synthetic construct
  REGION 1..6: note = Description of Artificial Sequence: Syntheticpeptide
SPYNTL

SEQ ID NO: 1704 - protein, 6 aa, synthetic construct
  REGION 1..6: note = Description of Artificial Sequence: Syntheticpeptide
SPYPGI

SEQ ID NO: 1705 - protein, 6 aa, synthetic construct
  REGION 1..6: note = Description of Artificial Sequence: Syntheticpeptide
SPYPGV

SEQ ID NO: 1706 - protein, 6 aa, synthetic construct
  REGION 1..6: note = Description of Artificial Sequence: Syntheticpeptide
SPYQEL

SEQ ID NO: 1707 - protein, 6 aa, synthetic construct
  REGION 1..6: note = Description of Artificial Sequence: Syntheticpeptide
SPYRSV

SEQ ID NO: 1708 - protein, 6 aa, synthetic construct
  REGION 1..6: note = Description of Artificial Sequence: Syntheticpeptide
SPYSRL

SEQ ID NO: 1709 - protein, 6 aa, synthetic construct
  REGION 1..6: note = Description of Artificial Sequence: Syntheticpeptide
SPYTDV

SEQ ID NO: 1710 - protein, 6 aa, synthetic construct
  REGION 1..6: note = Description of Artificial Sequence: Syntheticpeptide
SPYTSV

SEQ ID NO: 1711 - protein, 6 aa, synthetic construct
  REGION 1..6: note = Description of Artificial Sequence: Syntheticpeptide
SPYVVI

SEQ ID NO: 1712 - protein, 6 aa, synthetic construct
  REGION 1..6: note = Description of Artificial Sequence: Syntheticpeptide
SQYCVL

SEQ ID NO: 1713 - protein, 6 aa, synthetic construct
  REGION 1..6: note = Description of Artificial Sequence: Syntheticpeptide
SQYEAL

SEQ ID NO: 1714 - protein, 6 aa, synthetic construct
  REGION 1..6: note = Description of Artificial Sequence: Syntheticpeptide
SQYKRL

SEQ ID NO: 1715 - protein, 6 aa, synthetic construct
  REGION 1..6: note = Description of Artificial Sequence: Syntheticpeptide
SQYLAL

SEQ ID NO: 1716 - protein, 6 aa, synthetic construct
  REGION 1..6: note = Description of Artificial Sequence: Syntheticpeptide
SQYLRL

SEQ ID NO: 1717 - protein, 6 aa, synthetic construct
  REGION 1..6: note = Description of Artificial Sequence: Syntheticpeptide
SQYMHV

SEQ ID NO: 1718 - protein, 6 aa, synthetic construct
  REGION 1..6: note = Description of Artificial Sequence: Syntheticpeptide
SQYSAV

SEQ ID NO: 1719 - protein, 6 aa, synthetic construct
  REGION 1..6: note = Description of Artificial Sequence: Syntheticpeptide
SQYTSI

SEQ ID NO: 1720 - protein, 6 aa, synthetic construct
  REGION 1..6: note = Description of Artificial Sequence: Syntheticpeptide
SQYWRL

SEQ ID NO: 1721 - protein, 6 aa, synthetic construct
  REGION 1..6: note = Description of Artificial Sequence: Syntheticpeptide
SRYAEL

SEQ ID NO: 1722 - protein, 6 aa, synthetic construct
  REGION 1..6: note = Description of Artificial Sequence: Syntheticpeptide
SRYATL

SEQ ID NO: 1723 - protein, 6 aa, synthetic construct
  REGION 1..6: note = Description of Artificial Sequence: Syntheticpeptide
SRYESL

SEQ ID NO: 1724 - protein, 6 aa, synthetic construct
  REGION 1..6: note = Description of Artificial Sequence: Syntheticpeptide
SRYGLL

SEQ ID NO: 1725 - protein, 6 aa, synthetic construct
  REGION 1..6: note = Description of Artificial Sequence: Syntheticpeptide
SRYLSL

SEQ ID NO: 1726 - protein, 6 aa, synthetic construct
  REGION 1..6: note = Description of Artificial Sequence: Syntheticpeptide
SRYMEL

SEQ ID NO: 1727 - protein, 6 aa, synthetic construct
  REGION 1..6: note = Description of Artificial Sequence: Syntheticpeptide
SRYMRI

SEQ ID NO: 1728 - protein, 6 aa, synthetic construct
  REGION 1..6: note = Description of Artificial Sequence: Syntheticpeptide
SRYPPV

SEQ ID NO: 1729 - protein, 6 aa, synthetic construct
  REGION 1..6: note = Description of Artificial Sequence: Syntheticpeptide
SRYQAL

SEQ ID NO: 1730 - protein, 6 aa, synthetic construct
  REGION 1..6: note = Description of Artificial Sequence: Syntheticpeptide
SRYQQL

SEQ ID NO: 1731 - protein, 6 aa, synthetic construct
  REGION 1..6: note = Description of Artificial Sequence: Syntheticpeptide
SRYRFI

SEQ ID NO: 1732 - protein, 6 aa, synthetic construct
  REGION 1..6: note = Description of Artificial Sequence: Syntheticpeptide
SRYRFV

SEQ ID NO: 1733 - protein, 6 aa, synthetic construct
  REGION 1..6: note = Description of Artificial Sequence: Syntheticpeptide
SRYSAL

SEQ ID NO: 1734 - protein, 6 aa, synthetic construct
  REGION 1..6: note = Description of Artificial Sequence: Syntheticpeptide
SRYSDL

SEQ ID NO: 1735 - protein, 6 aa, synthetic construct
  REGION 1..6: note = Description of Artificial Sequence: Syntheticpeptide
SRYTGL

SEQ ID NO: 1736 - protein, 6 aa, synthetic construct
  REGION 1..6: note = Description of Artificial Sequence: Syntheticpeptide
SRYVRL

SEQ ID NO: 1737 - protein, 6 aa, synthetic construct
  REGION 1..6: note = Description of Artificial Sequence: Syntheticpeptide
SSYDEL

SEQ ID NO: 1738 - protein, 6 aa, synthetic construct
  REGION 1..6: note = Description of Artificial Sequence: Syntheticpeptide
SSYEAL

SEQ ID NO: 1739 - protein, 6 aa, synthetic construct
  REGION 1..6: note = Description of Artificial Sequence: Syntheticpeptide
SSYEIV

SEQ ID NO: 1740 - protein, 6 aa, synthetic construct
  REGION 1..6: note = Description of Artificial Sequence: Syntheticpeptide
SSYEPL

SEQ ID NO: 1741 - protein, 6 aa, synthetic construct
  REGION 1..6: note = Description of Artificial Sequence: Syntheticpeptide
SSYGRL

SEQ ID NO: 1742 - protein, 6 aa, synthetic construct
  REGION 1..6: note = Description of Artificial Sequence: Syntheticpeptide
SSYGSI

SEQ ID NO: 1743 - protein, 6 aa, synthetic construct
  REGION 1..6: note = Description of Artificial Sequence: Syntheticpeptide
SSYGSL

SEQ ID NO: 1744 - protein, 6 aa, synthetic construct
  REGION 1..6: note = Description of Artificial Sequence: Syntheticpeptide
SSYHII

SEQ ID NO: 1745 - protein, 6 aa, synthetic construct
  REGION 1..6: note = Description of Artificial Sequence: Syntheticpeptide
SSYHIL

SEQ ID NO: 1746 - protein, 6 aa, synthetic construct
  REGION 1..6: note = Description of Artificial Sequence: Syntheticpeptide
SSYHKL

SEQ ID NO: 1747 - protein, 6 aa, synthetic construct
  REGION 1..6: note = Description of Artificial Sequence: Syntheticpeptide
SSYHNI

SEQ ID NO: 1748 - protein, 6 aa, synthetic construct
  REGION 1..6: note = Description of Artificial Sequence: Syntheticpeptide
SSYIKV

SEQ ID NO: 1749 - protein, 6 aa, synthetic construct
  REGION 1..6: note = Description of Artificial Sequence: Syntheticpeptide
SSYNSV

SEQ ID NO: 1750 - protein, 6 aa, synthetic construct
  REGION 1..6: note = Description of Artificial Sequence: Syntheticpeptide
SSYQEI

SEQ ID NO: 1751 - protein, 6 aa, synthetic construct
  REGION 1..6: note = Description of Artificial Sequence: Syntheticpeptide
SSYRKV

SEQ ID NO: 1752 - protein, 6 aa, synthetic construct
  REGION 1..6: note = Description of Artificial Sequence: Syntheticpeptide
SSYRRV

SEQ ID NO: 1753 - protein, 6 aa, synthetic construct
  REGION 1..6: note = Description of Artificial Sequence: Syntheticpeptide
SSYSDI

SEQ ID NO: 1754 - protein, 6 aa, synthetic construct
  REGION 1..6: note = Description of Artificial Sequence: Syntheticpeptide
SSYTPL

SEQ ID NO: 1755 - protein, 6 aa, synthetic construct
  REGION 1..6: note = Description of Artificial Sequence: Syntheticpeptide
SSYTRL

SEQ ID NO: 1756 - protein, 6 aa, synthetic construct
  REGION 1..6: note = Description of Artificial Sequence: Syntheticpeptide
SSYTSV

SEQ ID NO: 1757 - protein, 6 aa, synthetic construct
  REGION 1..6: note = Description of Artificial Sequence: Syntheticpeptide
SSYTTI

SEQ ID NO: 1758 - protein, 6 aa, synthetic construct
  REGION 1..6: note = Description of Artificial Sequence: Syntheticpeptide
SSYVKL

SEQ ID NO: 1759 - protein, 6 aa, synthetic construct
  REGION 1..6: note = Description of Artificial Sequence: Syntheticpeptide
STYAEV

SEQ ID NO: 1760 - protein, 6 aa, synthetic construct
  REGION 1..6: note = Description of Artificial Sequence: Syntheticpeptide
STYAGI

SEQ ID NO: 1761 - protein, 6 aa, synthetic construct
  REGION 1..6: note = Description of Artificial Sequence: Syntheticpeptide
STYAHL

SEQ ID NO: 1762 - protein, 6 aa, synthetic construct
  REGION 1..6: note = Description of Artificial Sequence: Syntheticpeptide
STYALV

SEQ ID NO: 1763 - protein, 6 aa, synthetic construct
  REGION 1..6: note = Description of Artificial Sequence: Syntheticpeptide
STYAPI

SEQ ID NO: 1764 - protein, 6 aa, synthetic construct
  REGION 1..6: note = Description of Artificial Sequence: Syntheticpeptide
STYDHV

SEQ ID NO: 1765 - protein, 6 aa, synthetic construct
  REGION 1..6: note = Description of Artificial Sequence: Syntheticpeptide
STYDKV

SEQ ID NO: 1766 - protein, 6 aa, synthetic construct
  REGION 1..6: note = Description of Artificial Sequence: Syntheticpeptide
STYDQV

SEQ ID NO: 1767 - protein, 6 aa, synthetic construct
  REGION 1..6: note = Description of Artificial Sequence: Syntheticpeptide
STYDRI

SEQ ID NO: 1768 - protein, 6 aa, synthetic construct
  REGION 1..6: note = Description of Artificial Sequence: Syntheticpeptide
STYEEL

SEQ ID NO: 1769 - protein, 6 aa, synthetic construct
  REGION 1..6: note = Description of Artificial Sequence: Syntheticpeptide
STYEYL

SEQ ID NO: 1770 - protein, 6 aa, synthetic construct
  REGION 1..6: note = Description of Artificial Sequence: Syntheticpeptide
STYILV

SEQ ID NO: 1771 - protein, 6 aa, synthetic construct
  REGION 1..6: note = Description of Artificial Sequence: Syntheticpeptide
STYLPL

SEQ ID NO: 1772 - protein, 6 aa, synthetic construct
  REGION 1..6: note = Description of Artificial Sequence: Syntheticpeptide
STYMAV

SEQ ID NO: 1773 - protein, 6 aa, synthetic construct
  REGION 1..6: note = Description of Artificial Sequence: Syntheticpeptide
STYQTL

SEQ ID NO: 1774 - protein, 6 aa, synthetic construct
  REGION 1..6: note = Description of Artificial Sequence: Syntheticpeptide
STYRKL

SEQ ID NO: 1775 - protein, 6 aa, synthetic construct
  REGION 1..6: note = Description of Artificial Sequence: Syntheticpeptide
STYSQL

SEQ ID NO: 1776 - protein, 6 aa, synthetic construct
  REGION 1..6: note = Description of Artificial Sequence: Syntheticpeptide
STYTSI

SEQ ID NO: 1777 - protein, 6 aa, synthetic construct
  REGION 1..6: note = Description of Artificial Sequence: Syntheticpeptide
STYYQV

SEQ ID NO: 1778 - protein, 6 aa, synthetic construct
  REGION 1..6: note = Description of Artificial Sequence: Syntheticpeptide
SVYATL

SEQ ID NO: 1779 - protein, 6 aa, synthetic construct
  REGION 1..6: note = Description of Artificial Sequence: Syntheticpeptide
SVYCFL

SEQ ID NO: 1780 - protein, 6 aa, synthetic construct
  REGION 1..6: note = Description of Artificial Sequence: Syntheticpeptide
SVYCNL

SEQ ID NO: 1781 - protein, 6 aa, synthetic construct
  REGION 1..6: note = Description of Artificial Sequence: Syntheticpeptide
SVYDSV

SEQ ID NO: 1782 - protein, 6 aa, synthetic construct
  REGION 1..6: note = Description of Artificial Sequence: Syntheticpeptide
SVYDTI

SEQ ID NO: 1783 - protein, 6 aa, synthetic construct
  REGION 1..6: note = Description of Artificial Sequence: Syntheticpeptide
SVYEKV

SEQ ID NO: 1784 - protein, 6 aa, synthetic construct
  REGION 1..6: note = Description of Artificial Sequence: Syntheticpeptide
SVYEML

SEQ ID NO: 1785 - protein, 6 aa, synthetic construct
  REGION 1..6: note = Description of Artificial Sequence: Syntheticpeptide
SVYGSV

SEQ ID NO: 1786 - protein, 6 aa, synthetic construct
  REGION 1..6: note = Description of Artificial Sequence: Syntheticpeptide
SVYPII

SEQ ID NO: 1787 - protein, 6 aa, synthetic construct
  REGION 1..6: note = Description of Artificial Sequence: Syntheticpeptide
SVYQPI

SEQ ID NO: 1788 - protein, 6 aa, synthetic construct
  REGION 1..6: note = Description of Artificial Sequence: Syntheticpeptide
SVYRKV

SEQ ID NO: 1789 - protein, 6 aa, synthetic construct
  REGION 1..6: note = Description of Artificial Sequence: Syntheticpeptide
SVYSHL

SEQ ID NO: 1790 - protein, 6 aa, synthetic construct
  REGION 1..6: note = Description of Artificial Sequence: Syntheticpeptide
SVYSRV

SEQ ID NO: 1791 - protein, 6 aa, synthetic construct
  REGION 1..6: note = Description of Artificial Sequence: Syntheticpeptide
SVYTAL

SEQ ID NO: 1792 - protein, 6 aa, synthetic construct
  REGION 1..6: note = Description of Artificial Sequence: Syntheticpeptide
SVYTEL

SEQ ID NO: 1793 - protein, 6 aa, synthetic construct
  REGION 1..6: note = Description of Artificial Sequence: Syntheticpeptide
SVYWKV

SEQ ID NO: 1794 - protein, 6 aa, synthetic construct
  REGION 1..6: note = Description of Artificial Sequence: Syntheticpeptide
SWYDSI

SEQ ID NO: 1795 - protein, 6 aa, synthetic construct
  REGION 1..6: note = Description of Artificial Sequence: Syntheticpeptide
SWYFTV

SEQ ID NO: 1796 - protein, 6 aa, synthetic construct
  REGION 1..6: note = Description of Artificial Sequence: Syntheticpeptide
SYYKAI

SEQ ID NO: 1797 - protein, 6 aa, synthetic construct
  REGION 1..6: note = Description of Artificial Sequence: Syntheticpeptide
SYYLKL

SEQ ID NO: 1798 - protein, 6 aa, synthetic construct
  REGION 1..6: note = Description of Artificial Sequence: Syntheticpeptide
SYYSFV

SEQ ID NO: 1799 - protein, 6 aa, synthetic construct
  REGION 1..6: note = Description of Artificial Sequence: Syntheticpeptide
SYYVTI

SEQ ID NO: 1800 - protein, 6 aa, synthetic construct
  REGION 1..6: note = Description of Artificial Sequence: Syntheticpeptide
VAYADL

SEQ ID NO: 1801 - protein, 6 aa, synthetic construct
  REGION 1..6: note = Description of Artificial Sequence: Syntheticpeptide
VAYARI

SEQ ID NO: 1802 - protein, 6 aa, synthetic construct
  REGION 1..6: note = Description of Artificial Sequence: Syntheticpeptide
VAYARV

SEQ ID NO: 1803 - protein, 6 aa, synthetic construct
  REGION 1..6: note = Description of Artificial Sequence: Syntheticpeptide
VAYDQL

SEQ ID NO: 1804 - protein, 6 aa, synthetic construct
  REGION 1..6: note = Description of Artificial Sequence: Syntheticpeptide
VAYGHV

SEQ ID NO: 1805 - protein, 6 aa, synthetic construct
  REGION 1..6: note = Description of Artificial Sequence: Syntheticpeptide
VAYKQV

SEQ ID NO: 1806 - protein, 6 aa, synthetic construct
  REGION 1..6: note = Description of Artificial Sequence: Syntheticpeptide
VAYKRL

SEQ ID NO: 1807 - protein, 6 aa, synthetic construct
  REGION 1..6: note = Description of Artificial Sequence: Syntheticpeptide
VAYNLL

SEQ ID NO: 1808 - protein, 6 aa, synthetic construct
  REGION 1..6: note = Description of Artificial Sequence: Syntheticpeptide
VAYQRV

SEQ ID NO: 1809 - protein, 6 aa, synthetic construct
  REGION 1..6: note = Description of Artificial Sequence: Syntheticpeptide
VAYSGV

SEQ ID NO: 1810 - protein, 6 aa, synthetic construct
  REGION 1..6: note = Description of Artificial Sequence: Syntheticpeptide
VAYSQV

SEQ ID NO: 1811 - protein, 6 aa, synthetic construct
  REGION 1..6: note = Description of Artificial Sequence: Syntheticpeptide
VCYCIV

SEQ ID NO: 1812 - protein, 6 aa, synthetic construct
  REGION 1..6: note = Description of Artificial Sequence: Syntheticpeptide
VCYGLV

SEQ ID NO: 1813 - protein, 6 aa, synthetic construct
  REGION 1..6: note = Description of Artificial Sequence: Syntheticpeptide
VCYGRL

SEQ ID NO: 1814 - protein, 6 aa, synthetic construct
  REGION 1..6: note = Description of Artificial Sequence: Syntheticpeptide
VCYIVV

SEQ ID NO: 1815 - protein, 6 aa, synthetic construct
  REGION 1..6: note = Description of Artificial Sequence: Syntheticpeptide
VCYLLV

SEQ ID NO: 1816 - protein, 6 aa, synthetic construct
  REGION 1..6: note = Description of Artificial Sequence: Syntheticpeptide
VDYDCI

SEQ ID NO: 1817 - protein, 6 aa, synthetic construct
  REGION 1..6: note = Description of Artificial Sequence: Syntheticpeptide
VDYDFL

SEQ ID NO: 1818 - protein, 6 aa, synthetic construct
  REGION 1..6: note = Description of Artificial Sequence: Syntheticpeptide
VDYFTI

SEQ ID NO: 1819 - protein, 6 aa, synthetic construct
  REGION 1..6: note = Description of Artificial Sequence: Syntheticpeptide
VDYFVL

SEQ ID NO: 1820 - protein, 6 aa, synthetic construct
  REGION 1..6: note = Description of Artificial Sequence: Syntheticpeptide
VDYGEL

SEQ ID NO: 1821 - protein, 6 aa, synthetic construct
  REGION 1..6: note = Description of Artificial Sequence: Syntheticpeptide
VDYILV

SEQ ID NO: 1822 - protein, 6 aa, synthetic construct
  REGION 1..6: note = Description of Artificial Sequence: Syntheticpeptide
VDYIQV

SEQ ID NO: 1823 - protein, 6 aa, synthetic construct
  REGION 1..6: note = Description of Artificial Sequence: Syntheticpeptide
VDYKNI

SEQ ID NO: 1824 - protein, 6 aa, synthetic construct
  REGION 1..6: note = Description of Artificial Sequence: Syntheticpeptide
VDYMSI

SEQ ID NO: 1825 - protein, 6 aa, synthetic construct
  REGION 1..6: note = Description of Artificial Sequence: Syntheticpeptide
VDYNLV

SEQ ID NO: 1826 - protein, 6 aa, synthetic construct
  REGION 1..6: note = Description of Artificial Sequence: Syntheticpeptide
VDYPDV

SEQ ID NO: 1827 - protein, 6 aa, synthetic construct
  REGION 1..6: note = Description of Artificial Sequence: Syntheticpeptide
VDYSDL

SEQ ID NO: 1828 - protein, 6 aa, synthetic construct
  REGION 1..6: note = Description of Artificial Sequence: Syntheticpeptide
VDYSSV

SEQ ID NO: 1829 - protein, 6 aa, synthetic construct
  REGION 1..6: note = Description of Artificial Sequence: Syntheticpeptide
VDYTTL

SEQ ID NO: 1830 - protein, 6 aa, synthetic construct
  REGION 1..6: note = Description of Artificial Sequence: Syntheticpeptide
VDYVDV

SEQ ID NO: 1831 - protein, 6 aa, synthetic construct
  REGION 1..6: note = Description of Artificial Sequence: Syntheticpeptide
VDYVGV

SEQ ID NO: 1832 - protein, 6 aa, synthetic construct
  REGION 1..6: note = Description of Artificial Sequence: Syntheticpeptide
VDYVIL

SEQ ID NO: 1833 - protein, 6 aa, synthetic construct
  REGION 1..6: note = Description of Artificial Sequence: Syntheticpeptide
VDYVQV

SEQ ID NO: 1834 - protein, 6 aa, synthetic construct
  REGION 1..6: note = Description of Artificial Sequence: Syntheticpeptide
VEYAPL

SEQ ID NO: 1835 - protein, 6 aa, synthetic construct
  REGION 1..6: note = Description of Artificial Sequence: Syntheticpeptide
VEYDPL

SEQ ID NO: 1836 - protein, 6 aa, synthetic construct
  REGION 1..6: note = Description of Artificial Sequence: Syntheticpeptide
VEYGTI

SEQ ID NO: 1837 - protein, 6 aa, synthetic construct
  REGION 1..6: note = Description of Artificial Sequence: Syntheticpeptide
VEYHRL

SEQ ID NO: 1838 - protein, 6 aa, synthetic construct
  REGION 1..6: note = Description of Artificial Sequence: Syntheticpeptide
VEYLEV

SEQ ID NO: 1839 - protein, 6 aa, synthetic construct
  REGION 1..6: note = Description of Artificial Sequence: Syntheticpeptide
VEYQLL

SEQ ID NO: 1840 - protein, 6 aa, synthetic construct
  REGION 1..6: note = Description of Artificial Sequence: Syntheticpeptide
VEYRPL

SEQ ID NO: 1841 - protein, 6 aa, synthetic construct
  REGION 1..6: note = Description of Artificial Sequence: Syntheticpeptide
VEYSSI

SEQ ID NO: 1842 - protein, 6 aa, synthetic construct
  REGION 1..6: note = Description of Artificial Sequence: Syntheticpeptide
VEYSTV

SEQ ID NO: 1843 - protein, 6 aa, synthetic construct
  REGION 1..6: note = Description of Artificial Sequence: Syntheticpeptide
VFYAEI

SEQ ID NO: 1844 - protein, 6 aa, synthetic construct
  REGION 1..6: note = Description of Artificial Sequence: Syntheticpeptide
VFYLAV

SEQ ID NO: 1845 - protein, 6 aa, synthetic construct
  REGION 1..6: note = Description of Artificial Sequence: Syntheticpeptide
VFYRQV

SEQ ID NO: 1846 - protein, 6 aa, synthetic construct
  REGION 1..6: note = Description of Artificial Sequence: Syntheticpeptide
VFYVGV

SEQ ID NO: 1847 - protein, 6 aa, synthetic construct
  REGION 1..6: note = Description of Artificial Sequence: Syntheticpeptide
VFYYVI

SEQ ID NO: 1848 - protein, 6 aa, synthetic construct
  REGION 1..6: note = Description of Artificial Sequence: Syntheticpeptide
VFYYVL

SEQ ID NO: 1849 - protein, 6 aa, synthetic construct
  REGION 1..6: note = Description of Artificial Sequence: Syntheticpeptide
VGYETI

SEQ ID NO: 1850 - protein, 6 aa, synthetic construct
  REGION 1..6: note = Description of Artificial Sequence: Syntheticpeptide
VHYALL

SEQ ID NO: 1851 - protein, 6 aa, synthetic construct
  REGION 1..6: note = Description of Artificial Sequence: Syntheticpeptide
VHYARL

SEQ ID NO: 1852 - protein, 6 aa, synthetic construct
  REGION 1..6: note = Description of Artificial Sequence: Syntheticpeptide
VHYETL

SEQ ID NO: 1853 - protein, 6 aa, synthetic construct
  REGION 1..6: note = Description of Artificial Sequence: Syntheticpeptide
VHYGGV

SEQ ID NO: 1854 - protein, 6 aa, synthetic construct
  REGION 1..6: note = Description of Artificial Sequence: Syntheticpeptide
VHYHSL

SEQ ID NO: 1855 - protein, 6 aa, synthetic construct
  REGION 1..6: note = Description of Artificial Sequence: Syntheticpeptide
VHYIPV

SEQ ID NO: 1856 - protein, 6 aa, synthetic construct
  REGION 1..6: note = Description of Artificial Sequence: Syntheticpeptide
VHYKEI

SEQ ID NO: 1857 - protein, 6 aa, synthetic construct
  REGION 1..6: note = Description of Artificial Sequence: Syntheticpeptide
VHYLQV

SEQ ID NO: 1858 - protein, 6 aa, synthetic construct
  REGION 1..6: note = Description of Artificial Sequence: Syntheticpeptide
VHYNSL

SEQ ID NO: 1859 - protein, 6 aa, synthetic construct
  REGION 1..6: note = Description of Artificial Sequence: Syntheticpeptide
VHYQSV

SEQ ID NO: 1860 - protein, 6 aa, synthetic construct
  REGION 1..6: note = Description of Artificial Sequence: Syntheticpeptide
VHYRSL

SEQ ID NO: 1861 - protein, 6 aa, synthetic construct
  REGION 1..6: note = Description of Artificial Sequence: Syntheticpeptide
VIYAQL

SEQ ID NO: 1862 - protein, 6 aa, synthetic construct
  REGION 1..6: note = Description of Artificial Sequence: Syntheticpeptide
VIYDRL

SEQ ID NO: 1863 - protein, 6 aa, synthetic construct
  REGION 1..6: note = Description of Artificial Sequence: Syntheticpeptide
VIYENV

SEQ ID NO: 1864 - protein, 6 aa, synthetic construct
  REGION 1..6: note = Description of Artificial Sequence: Syntheticpeptide
VIYEPL

SEQ ID NO: 1865 - protein, 6 aa, synthetic construct
  REGION 1..6: note = Description of Artificial Sequence: Syntheticpeptide
VIYERL

SEQ ID NO: 1866 - protein, 6 aa, synthetic construct
  REGION 1..6: note = Description of Artificial Sequence: Syntheticpeptide
VIYIDV

SEQ ID NO: 1867 - protein, 6 aa, synthetic construct
  REGION 1..6: note = Description of Artificial Sequence: Syntheticpeptide
VIYKKI

SEQ ID NO: 1868 - protein, 6 aa, synthetic construct
  REGION 1..6: note = Description of Artificial Sequence: Syntheticpeptide
VIYKRI

SEQ ID NO: 1869 - protein, 6 aa, synthetic construct
  REGION 1..6: note = Description of Artificial Sequence: Syntheticpeptide
VIYPFL

SEQ ID NO: 1870 - protein, 6 aa, synthetic construct
  REGION 1..6: note = Description of Artificial Sequence: Syntheticpeptide
VIYPNI

SEQ ID NO: 1871 - protein, 6 aa, synthetic construct
  REGION 1..6: note = Description of Artificial Sequence: Syntheticpeptide
VIYSDL

SEQ ID NO: 1872 - protein, 6 aa, synthetic construct
  REGION 1..6: note = Description of Artificial Sequence: Syntheticpeptide
VIYSML

SEQ ID NO: 1873 - protein, 6 aa, synthetic construct
  REGION 1..6: note = Description of Artificial Sequence: Syntheticpeptide
VIYSSV

SEQ ID NO: 1874 - protein, 6 aa, synthetic construct
  REGION 1..6: note = Description of Artificial Sequence: Syntheticpeptide
VIYSWI

SEQ ID NO: 1875 - protein, 6 aa, synthetic construct
  REGION 1..6: note = Description of Artificial Sequence: Syntheticpeptide
VKYADI

SEQ ID NO: 1876 - protein, 6 aa, synthetic construct
  REGION 1..6: note = Description of Artificial Sequence: Syntheticpeptide
VKYARL

SEQ ID NO: 1877 - protein, 6 aa, synthetic construct
  REGION 1..6: note = Description of Artificial Sequence: Syntheticpeptide
VKYATL

SEQ ID NO: 1878 - protein, 6 aa, synthetic construct
  REGION 1..6: note = Description of Artificial Sequence: Syntheticpeptide
VKYEGL

SEQ ID NO: 1879 - protein, 6 aa, synthetic construct
  REGION 1..6: note = Description of Artificial Sequence: Syntheticpeptide
VKYGDL

SEQ ID NO: 1880 - protein, 6 aa, synthetic construct
  REGION 1..6: note = Description of Artificial Sequence: Syntheticpeptide
VKYGSV

SEQ ID NO: 1881 - protein, 6 aa, synthetic construct
  REGION 1..6: note = Description of Artificial Sequence: Syntheticpeptide
VKYLLV

SEQ ID NO: 1882 - protein, 6 aa, synthetic construct
  REGION 1..6: note = Description of Artificial Sequence: Syntheticpeptide
VKYNPV

SEQ ID NO: 1883 - protein, 6 aa, synthetic construct
  REGION 1..6: note = Description of Artificial Sequence: Syntheticpeptide
VKYPPI

SEQ ID NO: 1884 - protein, 6 aa, synthetic construct
  REGION 1..6: note = Description of Artificial Sequence: Syntheticpeptide
VKYQRL

SEQ ID NO: 1885 - protein, 6 aa, synthetic construct
  REGION 1..6: note = Description of Artificial Sequence: Syntheticpeptide
VKYQVI

SEQ ID NO: 1886 - protein, 6 aa, synthetic construct
  REGION 1..6: note = Description of Artificial Sequence: Syntheticpeptide
VKYSEV

SEQ ID NO: 1887 - protein, 6 aa, synthetic construct
  REGION 1..6: note = Description of Artificial Sequence: Syntheticpeptide
VKYSNV

SEQ ID NO: 1888 - protein, 6 aa, synthetic construct
  REGION 1..6: note = Description of Artificial Sequence: Syntheticpeptide
VKYSRL

SEQ ID NO: 1889 - protein, 6 aa, synthetic construct
  REGION 1..6: note = Description of Artificial Sequence: Syntheticpeptide
VKYSTL

SEQ ID NO: 1890 - protein, 6 aa, synthetic construct
  REGION 1..6: note = Description of Artificial Sequence: Syntheticpeptide
VKYVDL

SEQ ID NO: 1891 - protein, 6 aa, synthetic construct
  REGION 1..6: note = Description of Artificial Sequence: Syntheticpeptide
VLYADI

SEQ ID NO: 1892 - protein, 6 aa, synthetic construct
  REGION 1..6: note = Description of Artificial Sequence: Syntheticpeptide
VLYAML

SEQ ID NO: 1893 - protein, 6 aa, synthetic construct
  REGION 1..6: note = Description of Artificial Sequence: Syntheticpeptide
VLYASV

SEQ ID NO: 1894 - protein, 6 aa, synthetic construct
  REGION 1..6: note = Description of Artificial Sequence: Syntheticpeptide
VLYCLL

SEQ ID NO: 1895 - protein, 6 aa, synthetic construct
  REGION 1..6: note = Description of Artificial Sequence: Syntheticpeptide
VLYCLV

SEQ ID NO: 1896 - protein, 6 aa, synthetic construct
  REGION 1..6: note = Description of Artificial Sequence: Syntheticpeptide
VLYCVL

SEQ ID NO: 1897 - protein, 6 aa, synthetic construct
  REGION 1..6: note = Description of Artificial Sequence: Syntheticpeptide
VLYDCL

SEQ ID NO: 1898 - protein, 6 aa, synthetic construct
  REGION 1..6: note = Description of Artificial Sequence: Syntheticpeptide
VLYFHI

SEQ ID NO: 1899 - protein, 6 aa, synthetic construct
  REGION 1..6: note = Description of Artificial Sequence: Syntheticpeptide
VLYFTV

SEQ ID NO: 1900 - protein, 6 aa, synthetic construct
  REGION 1..6: note = Description of Artificial Sequence: Syntheticpeptide
VLYGDL

SEQ ID NO: 1901 - protein, 6 aa, synthetic construct
  REGION 1..6: note = Description of Artificial Sequence: Syntheticpeptide
VLYGQL

SEQ ID NO: 1902 - protein, 6 aa, synthetic construct
  REGION 1..6: note = Description of Artificial Sequence: Syntheticpeptide
VLYPMV

SEQ ID NO: 1903 - protein, 6 aa, synthetic construct
  REGION 1..6: note = Description of Artificial Sequence: Syntheticpeptide
VLYPRL

SEQ ID NO: 1904 - protein, 6 aa, synthetic construct
  REGION 1..6: note = Description of Artificial Sequence: Syntheticpeptide
VLYPRV

SEQ ID NO: 1905 - protein, 6 aa, synthetic construct
  REGION 1..6: note = Description of Artificial Sequence: Syntheticpeptide
VLYSEL

SEQ ID NO: 1906 - protein, 6 aa, synthetic construct
  REGION 1..6: note = Description of Artificial Sequence: Syntheticpeptide
VLYSRV

SEQ ID NO: 1907 - protein, 6 aa, synthetic construct
  REGION 1..6: note = Description of Artificial Sequence: Syntheticpeptide
VLYTAV

SEQ ID NO: 1908 - protein, 6 aa, synthetic construct
  REGION 1..6: note = Description of Artificial Sequence: Syntheticpeptide
VLYTIL

SEQ ID NO: 1909 - protein, 6 aa, synthetic construct
  REGION 1..6: note = Description of Artificial Sequence: Syntheticpeptide
VMYDAV

SEQ ID NO: 1910 - protein, 6 aa, synthetic construct
  REGION 1..6: note = Description of Artificial Sequence: Syntheticpeptide
VNYESI

SEQ ID NO: 1911 - protein, 6 aa, synthetic construct
  REGION 1..6: note = Description of Artificial Sequence: Syntheticpeptide
VNYSAL

SEQ ID NO: 1912 - protein, 6 aa, synthetic construct
  REGION 1..6: note = Description of Artificial Sequence: Syntheticpeptide
VNYSKI

SEQ ID NO: 1913 - protein, 6 aa, synthetic construct
  REGION 1..6: note = Description of Artificial Sequence: Syntheticpeptide
VNYSSI

SEQ ID NO: 1914 - protein, 6 aa, synthetic construct
  REGION 1..6: note = Description of Artificial Sequence: Syntheticpeptide
VPYALL

SEQ ID NO: 1915 - protein, 6 aa, synthetic construct
  REGION 1..6: note = Description of Artificial Sequence: Syntheticpeptide
VPYDTL

SEQ ID NO: 1916 - protein, 6 aa, synthetic construct
  REGION 1..6: note = Description of Artificial Sequence: Syntheticpeptide
VPYEDV

SEQ ID NO: 1917 - protein, 6 aa, synthetic construct
  REGION 1..6: note = Description of Artificial Sequence: Syntheticpeptide
VPYEEL

SEQ ID NO: 1918 - protein, 6 aa, synthetic construct
  REGION 1..6: note = Description of Artificial Sequence: Syntheticpeptide
VPYKTI

SEQ ID NO: 1919 - protein, 6 aa, synthetic construct
  REGION 1..6: note = Description of Artificial Sequence: Syntheticpeptide
VPYLRV

SEQ ID NO: 1920 - protein, 6 aa, synthetic construct
  REGION 1..6: note = Description of Artificial Sequence: Syntheticpeptide
VPYNDL

SEQ ID NO: 1921 - protein, 6 aa, synthetic construct
  REGION 1..6: note = Description of Artificial Sequence: Syntheticpeptide
VPYPAL

SEQ ID NO: 1922 - protein, 6 aa, synthetic construct
  REGION 1..6: note = Description of Artificial Sequence: Syntheticpeptide
VPYQEL

SEQ ID NO: 1923 - protein, 6 aa, synthetic construct
  REGION 1..6: note = Description of Artificial Sequence: Syntheticpeptide
VPYRLL

SEQ ID NO: 1924 - protein, 6 aa, synthetic construct
  REGION 1..6: note = Description of Artificial Sequence: Syntheticpeptide
VPYSEL

SEQ ID NO: 1925 - protein, 6 aa, synthetic construct
  REGION 1..6: note = Description of Artificial Sequence: Syntheticpeptide
VPYTLL

SEQ ID NO: 1926 - protein, 6 aa, synthetic construct
  REGION 1..6: note = Description of Artificial Sequence: Syntheticpeptide
VPYTPL

SEQ ID NO: 1927 - protein, 6 aa, synthetic construct
  REGION 1..6: note = Description of Artificial Sequence: Syntheticpeptide
VPYTTL

SEQ ID NO: 1928 - protein, 6 aa, synthetic construct
  REGION 1..6: note = Description of Artificial Sequence: Syntheticpeptide
VPYVEL

SEQ ID NO: 1929 - protein, 6 aa, synthetic construct
  REGION 1..6: note = Description of Artificial Sequence: Syntheticpeptide
VPYVMV

SEQ ID NO: 1930 - protein, 6 aa, synthetic construct
  REGION 1..6: note = Description of Artificial Sequence: Syntheticpeptide
VPYVSL

SEQ ID NO: 1931 - protein, 6 aa, synthetic construct
  REGION 1..6: note = Description of Artificial Sequence: Syntheticpeptide
VQYKAV

SEQ ID NO: 1932 - protein, 6 aa, synthetic construct
  REGION 1..6: note = Description of Artificial Sequence: Syntheticpeptide
VQYKEI

SEQ ID NO: 1933 - protein, 6 aa, synthetic construct
  REGION 1..6: note = Description of Artificial Sequence: Syntheticpeptide
VQYNIV

SEQ ID NO: 1934 - protein, 6 aa, synthetic construct
  REGION 1..6: note = Description of Artificial Sequence: Syntheticpeptide
VQYRPV

SEQ ID NO: 1935 - protein, 6 aa, synthetic construct
  REGION 1..6: note = Description of Artificial Sequence: Syntheticpeptide
VQYSQI

SEQ ID NO: 1936 - protein, 6 aa, synthetic construct
  REGION 1..6: note = Description of Artificial Sequence: Syntheticpeptide
VQYSTV

SEQ ID NO: 1937 - protein, 6 aa, synthetic construct
  REGION 1..6: note = Description of Artificial Sequence: Syntheticpeptide
VQYTEV

SEQ ID NO: 1938 - protein, 6 aa, synthetic construct
  REGION 1..6: note = Description of Artificial Sequence: Syntheticpeptide
VQYYNI

SEQ ID NO: 1939 - protein, 6 aa, synthetic construct
  REGION 1..6: note = Description of Artificial Sequence: Syntheticpeptide
VRYARL

SEQ ID NO: 1940 - protein, 6 aa, synthetic construct
  REGION 1..6: note = Description of Artificial Sequence: Syntheticpeptide
VRYDNL

SEQ ID NO: 1941 - protein, 6 aa, synthetic construct
  REGION 1..6: note = Description of Artificial Sequence: Syntheticpeptide
VRYGRI

SEQ ID NO: 1942 - protein, 6 aa, synthetic construct
  REGION 1..6: note = Description of Artificial Sequence: Syntheticpeptide
VRYKKL

SEQ ID NO: 1943 - protein, 6 aa, synthetic construct
  REGION 1..6: note = Description of Artificial Sequence: Syntheticpeptide
VRYKRV

SEQ ID NO: 1944 - protein, 6 aa, synthetic construct
  REGION 1..6: note = Description of Artificial Sequence: Syntheticpeptide
VRYLDV

SEQ ID NO: 1945 - protein, 6 aa, synthetic construct
  REGION 1..6: note = Description of Artificial Sequence: Syntheticpeptide
VRYRTI

SEQ ID NO: 1946 - protein, 6 aa, synthetic construct
  REGION 1..6: note = Description of Artificial Sequence: Syntheticpeptide
VRYSDI

SEQ ID NO: 1947 - protein, 6 aa, synthetic construct
  REGION 1..6: note = Description of Artificial Sequence: Syntheticpeptide
VRYTQL

SEQ ID NO: 1948 - protein, 6 aa, synthetic construct
  REGION 1..6: note = Description of Artificial Sequence: Syntheticpeptide
VRYVCL

SEQ ID NO: 1949 - protein, 6 aa, synthetic construct
  REGION 1..6: note = Description of Artificial Sequence: Syntheticpeptide
VSYAEL

SEQ ID NO: 1950 - protein, 6 aa, synthetic construct
  REGION 1..6: note = Description of Artificial Sequence: Syntheticpeptide
VSYASV

SEQ ID NO: 1951 - protein, 6 aa, synthetic construct
  REGION 1..6: note = Description of Artificial Sequence: Syntheticpeptide
VSYEPI

SEQ ID NO: 1952 - protein, 6 aa, synthetic construct
  REGION 1..6: note = Description of Artificial Sequence: Syntheticpeptide
VSYGDI

SEQ ID NO: 1953 - protein, 6 aa, synthetic construct
  REGION 1..6: note = Description of Artificial Sequence: Syntheticpeptide
VSYIGL

SEQ ID NO: 1954 - protein, 6 aa, synthetic construct
  REGION 1..6: note = Description of Artificial Sequence: Syntheticpeptide
VSYILV

SEQ ID NO: 1955 - protein, 6 aa, synthetic construct
  REGION 1..6: note = Description of Artificial Sequence: Syntheticpeptide
VSYMML

SEQ ID NO: 1956 - protein, 6 aa, synthetic construct
  REGION 1..6: note = Description of Artificial Sequence: Syntheticpeptide
VSYNNI

SEQ ID NO: 1957 - protein, 6 aa, synthetic construct
  REGION 1..6: note = Description of Artificial Sequence: Syntheticpeptide
VSYNNL

SEQ ID NO: 1958 - protein, 6 aa, synthetic construct
  REGION 1..6: note = Description of Artificial Sequence: Syntheticpeptide
VSYQEI

SEQ ID NO: 1959 - protein, 6 aa, synthetic construct
  REGION 1..6: note = Description of Artificial Sequence: Syntheticpeptide
VSYQPI

SEQ ID NO: 1960 - protein, 6 aa, synthetic construct
  REGION 1..6: note = Description of Artificial Sequence: Syntheticpeptide
VSYSAV

SEQ ID NO: 1961 - protein, 6 aa, synthetic construct
  REGION 1..6: note = Description of Artificial Sequence: Syntheticpeptide
VSYSFL

SEQ ID NO: 1962 - protein, 6 aa, synthetic construct
  REGION 1..6: note = Description of Artificial Sequence: Syntheticpeptide
VSYSLV

SEQ ID NO: 1963 - protein, 6 aa, synthetic construct
  REGION 1..6: note = Description of Artificial Sequence: Syntheticpeptide
VSYSPV

SEQ ID NO: 1964 - protein, 6 aa, synthetic construct
  REGION 1..6: note = Description of Artificial Sequence: Syntheticpeptide
VSYTML

SEQ ID NO: 1965 - protein, 6 aa, synthetic construct
  REGION 1..6: note = Description of Artificial Sequence: Syntheticpeptide
VSYTNL

SEQ ID NO: 1966 - protein, 6 aa, synthetic construct
  REGION 1..6: note = Description of Artificial Sequence: Syntheticpeptide
VSYTPL

SEQ ID NO: 1967 - protein, 6 aa, synthetic construct
  REGION 1..6: note = Description of Artificial Sequence: Syntheticpeptide
VSYVKI

SEQ ID NO: 1968 - protein, 6 aa, synthetic construct
  REGION 1..6: note = Description of Artificial Sequence: Syntheticpeptide
VSYVLL

SEQ ID NO: 1969 - protein, 6 aa, synthetic construct
  REGION 1..6: note = Description of Artificial Sequence: Syntheticpeptide
VTYADL

SEQ ID NO: 1970 - protein, 6 aa, synthetic construct
  REGION 1..6: note = Description of Artificial Sequence: Syntheticpeptide
VTYAEL

SEQ ID NO: 1971 - protein, 6 aa, synthetic construct
  REGION 1..6: note = Description of Artificial Sequence: Syntheticpeptide
VTYAEV

SEQ ID NO: 1972 - protein, 6 aa, synthetic construct
  REGION 1..6: note = Description of Artificial Sequence: Syntheticpeptide
VTYAKV

SEQ ID NO: 1973 - protein, 6 aa, synthetic construct
  REGION 1..6: note = Description of Artificial Sequence: Syntheticpeptide
VTYAPV

SEQ ID NO: 1974 - protein, 6 aa, synthetic construct
  REGION 1..6: note = Description of Artificial Sequence: Syntheticpeptide
VTYAQL

SEQ ID NO: 1975 - protein, 6 aa, synthetic construct
  REGION 1..6: note = Description of Artificial Sequence: Syntheticpeptide
VTYATL

SEQ ID NO: 1976 - protein, 6 aa, synthetic construct
  REGION 1..6: note = Description of Artificial Sequence: Syntheticpeptide
VTYATV

SEQ ID NO: 1977 - protein, 6 aa, synthetic construct
  REGION 1..6: note = Description of Artificial Sequence: Syntheticpeptide
VTYGNI

SEQ ID NO: 1978 - protein, 6 aa, synthetic construct
  REGION 1..6: note = Description of Artificial Sequence: Syntheticpeptide
VTYITI

SEQ ID NO: 1979 - protein, 6 aa, synthetic construct
  REGION 1..6: note = Description of Artificial Sequence: Syntheticpeptide
VTYQII

SEQ ID NO: 1980 - protein, 6 aa, synthetic construct
  REGION 1..6: note = Description of Artificial Sequence: Syntheticpeptide
VTYQIL

SEQ ID NO: 1981 - protein, 6 aa, synthetic construct
  REGION 1..6: note = Description of Artificial Sequence: Syntheticpeptide
VTYQLL

SEQ ID NO: 1982 - protein, 6 aa, synthetic construct
  REGION 1..6: note = Description of Artificial Sequence: Syntheticpeptide
VTYSAL

SEQ ID NO: 1983 - protein, 6 aa, synthetic construct
  REGION 1..6: note = Description of Artificial Sequence: Syntheticpeptide
VTYSTL

SEQ ID NO: 1984 - protein, 6 aa, synthetic construct
  REGION 1..6: note = Description of Artificial Sequence: Syntheticpeptide
VTYTLL

SEQ ID NO: 1985 - protein, 6 aa, synthetic construct
  REGION 1..6: note = Description of Artificial Sequence: Syntheticpeptide
VTYTQL

SEQ ID NO: 1986 - protein, 6 aa, synthetic construct
  REGION 1..6: note = Description of Artificial Sequence: Syntheticpeptide
VTYVNL

SEQ ID NO: 1987 - protein, 6 aa, synthetic construct
  REGION 1..6: note = Description of Artificial Sequence: Syntheticpeptide
VVYADI

SEQ ID NO: 1988 - protein, 6 aa, synthetic construct
  REGION 1..6: note = Description of Artificial Sequence: Syntheticpeptide
VVYEDV

SEQ ID NO: 1989 - protein, 6 aa, synthetic construct
  REGION 1..6: note = Description of Artificial Sequence: Syntheticpeptide
VVYFCL

SEQ ID NO: 1990 - protein, 6 aa, synthetic construct
  REGION 1..6: note = Description of Artificial Sequence: Syntheticpeptide
VVYKTL

SEQ ID NO: 1991 - protein, 6 aa, synthetic construct
  REGION 1..6: note = Description of Artificial Sequence: Syntheticpeptide
VVYQKL

SEQ ID NO: 1992 - protein, 6 aa, synthetic construct
  REGION 1..6: note = Description of Artificial Sequence: Syntheticpeptide
VVYSEV

SEQ ID NO: 1993 - protein, 6 aa, synthetic construct
  REGION 1..6: note = Description of Artificial Sequence: Syntheticpeptide
VVYSQV

SEQ ID NO: 1994 - protein, 6 aa, synthetic construct
  REGION 1..6: note = Description of Artificial Sequence: Syntheticpeptide
VVYSVV

SEQ ID NO: 1995 - protein, 6 aa, synthetic construct
  REGION 1..6: note = Description of Artificial Sequence: Syntheticpeptide
VVYTVL

SEQ ID NO: 1996 - protein, 6 aa, synthetic construct
  REGION 1..6: note = Description of Artificial Sequence: Syntheticpeptide
VVYYRI

SEQ ID NO: 1997 - protein, 6 aa, synthetic construct
  REGION 1..6: note = Description of Artificial Sequence: Syntheticpeptide
VYYHWL

SEQ ID NO: 1998 - protein, 6 aa, synthetic construct
  REGION 1..6: note = Description of Artificial Sequence: Syntheticpeptide
VYYLPL

SEQ ID NO: 1999 - protein, 307 aa, synthetic construct
  REGION 1..307: note = Description of Artificial Sequence: Syntheticpolypeptide
MMALPVTALLLPLALLLHAEVQLQQSGPELVKPGTSVRISCKTSGYTFTEYTIHWVKQSHGKSLEWIGNINPNNGGTTYNQKFEDKATLTVDKSSSTAYMELRSLTSEDSAVYYCAAGWNFDYWGQGTTVTVSSGGGGSGGGGSGGGGSDIVMTQSHKFMSTSVGDRVSIICKASQDVGTAVDWYQQKPGQSPKLLIYWASTRHTGVPDRFTGSGSGTDFTLTITNVQSEDLADYFCQQYNSYPLTFGAGTMLDLKRAAATERRAEVPTAHPSPSPRPAGQFQTLVVGVVGGLLGSLVLLVWVLAVI

SEQ ID NO: 2000 - protein, 97 aa, synthetic construct
  REGION 1..97: note = Description of Artificial Sequence: Syntheticpolypeptide
CSRAARGTIGARRTGQPLKEDPSAVPVFSVDYGELDFQWREKTPEPPVPCVPEQTEYATIVFPSGMGTSSPARRGSADGPRSAQPLRPEDGHCSWPL

SEQ ID NO: 2001 - protein, 111 aa, synthetic construct
  REGION 1..111: note = Description of Artificial Sequence: Syntheticpolypeptide
RRHQGKQNELSDTAGREINLVDAHLKSEQTEASTRQNSQVLLSETGIYDNDPDLCFRMQEGSEVYSNPCLEENKPGIVYASLNHSVIGPNSRLARNVKEAPTEYASICVRS

SEQ ID NO: 2002 - protein, 120 aa, synthetic construct
  REGION 1..120: note = Description of Artificial Sequence: Syntheticpolypeptide
WRRKRKEKQSETSPKEFLTIYEDVKDLKTRRNHEQEQTFPGGGSTIYSMIQSQSSAPTSQEPAYTLYSLIQPSRKSGSRKRNHSPSFNSTIYEVIGKSQPKAQNPARLSRKELENFDVYS

SEQ ID NO: 2003 - protein, 138 aa, synthetic construct
  REGION 1..138: note = Description of Artificial Sequence: Syntheticpolypeptide
CSRAARGTIGARRTGQPLKEDPSAVPVFSVDYGELDFQWREKTPEPPVPCVPEQTEYATIVFPSGMGTSSPARRGSADGPRSAQPLRPEDGHCSWPLAVSLSKMLKKRSPLTTGVYVKMPPTEPECEKQFQPYFIPIN

SEQ ID NO: 2004 - protein, 151 aa, synthetic construct
  REGION 1..151: note = Description of Artificial Sequence: Syntheticpolypeptide
CSRAARGTIGARRTGQPLKEDPSAVPVFSVDYGELDFQWREKTPEPPVPCVPEQTEYATIVFPSGMGTSSPARRGSADGPRSAQPLRPEDGHCSWPLHLWRRQWRPRRFSALEQGIHPPQAQSKIEELEQEPEPEPEPEPEPEPEPEPEQL

SEQ ID NO: 2005 - protein, 194 aa, synthetic construct
  REGION 1..194: note = Description of Artificial Sequence: Syntheticpolypeptide
CSRAARGTIGARRTGQPLKEDPSAVPVFSVDYGELDFQWREKTPEPPVPCVPEQTEYATIVFPSGMGTSSPARRGSADGPRSAQPLRPEDGHCSWPLCSRAARGTIGARRTGQPLKEDPSAVPVFSVDYGELDFQWREKTPEPPVPCVPEQTEYATIVFPSGMGTSSPARRGSADGPRSAQPLRPEDGHCSWPL

SEQ ID NO: 2006 - protein, 175 aa, synthetic construct
  REGION 1..175: note = Description of Artificial Sequence: Syntheticpolypeptide
CSRAARGTIGARRTGQPLKEDPSAVPVFSVDYGELDFQWREKTPEPPVPCVPEQTEYATIVFPSGMGTSSPARRGSADGPRSAQPLRPEDGHCSWPLFKWYSHSKEKIQNLSLISLANLPPSGLANAVAEGIRSEENIYTIEENVYEVEEPNEYYCYVSSRQQPSQPLGCRFAMP

SEQ ID NO: 2007 - protein, 113 aa, synthetic construct
  REGION 1..113: note = Description of Artificial Sequence: Syntheticpolypeptide
WRMMKYQQKAAGMSPEQVLQPLEGDLCYADLTLQLAGTSPQKATTKLSSAQVDQVEVEYVTMASLPKEDISYASLTLGAEDQEPTYCNMGHLSSHLPGRGPEEPTEYSTISRP

SEQ ID NO: 2008 - protein, 179 aa, synthetic construct
  REGION 1..179: note = Description of Artificial Sequence: Syntheticpolypeptide
KRKGRCSVPAFCSSQAEAPADTPEPTAGHTLYSVLSQGYEKLDTPLRPARQQPTPTSDSSSDSNLTTEEDEDRPEVHKPISGRYEVFDQVTQEGAGHDPAPEGQADYDPVTPYVTEVESVVGENTMYAQVFNLQGKTPVSQKEESSATIYCSIRKPQVVPPPQQNDLEIPESPTYENFT

SEQ ID NO: 2009 - protein, 118 aa, synthetic construct
  REGION 1..118: note = Description of Artificial Sequence: Syntheticpolypeptide
KCYFLRKAKAKQMPVEMSRPAVPLLNSNNEKMSDPNMEANSHYGHNDDVRNHAMKPINDNKEPLNSDVQYTEVQVSSAESHKDLGKKDTETVYSEVRKAVPDAVESRYSRTEGSLDGT

SEQ ID NO: 2010 - protein, 94 aa, synthetic construct
  REGION 1..94: note = Description of Artificial Sequence: Syntheticpolypeptide
VRSCRKKSARPAAGVGDTGIEDANAVRGSASQGPLTEPWAEDSPPDQPPPASARSSVGEGELQYASLSFQMVKPWDSRGQEATDTEYSEIKIHR

SEQ ID NO: 2011 - protein, 110 aa, synthetic construct
  REGION 1..110: note = Description of Artificial Sequence: Syntheticpolypeptide
RIRQKKAQGSTSSTRLHEPEKNAREITQDTNDITYADLNLPKGKKPAPQAAEPNNHTEYASIQTSPQPASEDTLTYADLDMVHLNRTPKQPAPKPEPSFSEYASVQVPRK

SEQ ID NO: 2012 - protein, 122 aa, synthetic construct
  REGION 1..122: note = Description of Artificial Sequence: Syntheticpolypeptide
CSRAARGTIGARRTGQPLKEDPSAVPVFSVDYGELDFQWREKTPEPPVPCVPEQTEYATIDFQWREKTPEPPVPCVPEQTEYATIVFPSGMGTSSPARRGSADGPRSAQPLRPEDGHCSWPL

SEQ ID NO: 2013 - protein, 147 aa, synthetic construct
  REGION 1..147: note = Description of Artificial Sequence: Syntheticpolypeptide
CSRAARGTIGARRTGQPLKEDPSAVPVFSVDYGELDFQWREKTPEPPVPCVPEQTEYATIDFQWREKTPEPPVPCVPEQTEYATIDFQWREKTPEPPVPCVPEQTEYATIVFPSGMGTSSPARRGSADGPRSAQPLRPEDGHCSWPL

SEQ ID NO: 2014 - protein, 97 aa, synthetic construct
  REGION 1..97: note = Description of Artificial Sequence: Syntheticpolypeptide
CSRAARGTIGARRTGQPLKEDPSAVPVFSVDYGELDFQWREKTPEPPVPCVPEQTEYSEIVFPSGMGTSSPARRGSADGPRSAQPLRPEDGHCSWPL

SEQ ID NO: 2015 - protein, 97 aa, synthetic construct
  REGION 1..97: note = Description of Artificial Sequence: Syntheticpolypeptide
CSRAARGTIGARRTGQPLKEDPSAVPVFSVDYGELDFQWREKTPEPPVPCVPEQTEYSEVVFPSGMGTSSPARRGSADGPRSAQPLRPEDGHCSWPL

SEQ ID NO: 2016 - protein, 97 aa, synthetic construct
  REGION 1..97: note = Description of Artificial Sequence: Syntheticpolypeptide
CSRAARGTIGARRTGQPLKEDPSAVPVFSVDYGELDFQWREKTPEPPVPCVPEQTEYASIVFPSGMGTSSPARRGSADGPRSAQPLRPEDGHCSWPL

SEQ ID NO: 2017 - protein, 181 aa, synthetic construct
  REGION 1..181: note = Description of Artificial Sequence: Syntheticpolypeptide
CSRAARGTIGARRTGQPLKEDPSAVPVFSVDYGELDFQWREKTPEPPVPCVPEQTEYATIVFPSGMGTSSPARRGSADGPRSAQPLRPEDGHCSWPLHRWCSNKKNAAVMDQESAGNRTANSEDSDEQDPQEVTYTQLNHCVFTQRKITRPSQRPKTPPTDIIVYAELPNAESRSKVVSCP

SEQ ID NO: 2018 - protein, 198 aa, synthetic construct
  REGION 1..198: note = Description of Artificial Sequence: Syntheticpolypeptide
CSRAARGTIGARRTGQPLKEDPSAVPVFSVDYGELDFQWREKTPEPPVPCVPEQTEYATIVFPSGMGTSSPARRGSADGPRSAQPLRPEDGHCSWPLHRQNQIKQGPPRSKDEEQKPQQRPDLAVDVLERTADKATVNGLPEKDRETDTSALAAGSSQEVTYAQLDHWALTQRTARAVSPQSTKPMAESITYAAVARH

SEQ ID NO: 2019 - protein, 486 aa, synthetic construct
  REGION 1..486: note = Description of Artificial Sequence: Syntheticpolypeptide
MALPVTALLLPLALLLHAARPDIQMTQTTSSLSASLGDRVTISCRASQDISKYLNWYQQKPDGTVKLLIYHTSRLHSGVPSRFSGSGSGTDYSLTISNLEQEDIATYFCQQGNTLPYTFGGGTKLEITGGGGSGGGGSGGGGSEVKLQESGPGLVAPSQSLSVTCTVSGVSLPDYGVSWIRQPPRKGLEWLGVIWGSETTYYNSALKSRLTIIKDNSKSQVFLKMNSLQTDDTAIYYCAKHYYYGGSYAMDYWGQGTSVTVSSTTTPAPRPPTPAPTIASQPLSLRPEACRPAAGGAVHTRGLDFACDIYIWAPLAGTCGVLLLSLVITLYCKRGRKKLLYIFKQPFMRPVQTTQEEDGCSCRFPEEEEGGCELRVKFSRSADAPAYKQGQNQLYNELNLGRREEYDVLDKRRGRDPEMGGKPRRKNPQEGLYNELQKDKMAEAYSEIGMKGERRRGKGHDGLYQGLSTATKDTYDALHMQALPPR

SEQ ID NO: 2020 - protein, 485 aa, synthetic construct
  REGION 1..485: note = Description of Artificial Sequence: Syntheticpolypeptide
MALPVTALLLPLALLLHAEVKLQQSGAELVRPGSSVKISCKASGYAFSSYWMNWVKQRPGQGLEWIGQIYPGDGDTNYNGKFKGQATLTADKSSSTAYMQLSGLTSEDSAVYFCARKTISSVVDFYFDYWGQGTTVTVSSGGGGSGGGGSGGGGSDIELTQSPKFMSTSVGDRVSVTCKASQNVGTNVAWYQQKPGQSPKPLIYSATYRNSGVPDRFTGSGSGTDFTLTITNVQSKDLADYFCQQYNRYPYTSGGGTKLEIKRAAAIEVMYPPPYLDNEKSNGTIIHVKGKHLCPSPLFPGPSKPFWVLVVVGGVLACYSLLVTVAFIIFWVRSKRSRLLHSDYMNMTPRRPGPTRKHYQPYAPPRDFAAYRSRVKFSRSADAPAYQQGQNQLYNELNLGRREEYDVLDKRRGRDPEMGGKPRRKNPQEGLYNELQKDKMAEAYSEIGMKGERRRGKGHDGLYQGLSTATKDTYDALHMQALPPR

SEQ ID NO: 2021 - protein, 168 aa, synthetic construct
  REGION 1..168: note = Description of Artificial Sequence: Syntheticpolypeptide
LRHRRQGKHWTSTQRKADFQHPAGAVGPEPTDRGLQWRSSPAADAQEENLYAAVKHTQPEDGVEMDTRSPHDEDPQAVTYAEVKHSRPRREMASPPSPLSGEFLDTKDRQAEEDRQMDTEAAASEAPQDVTYAQLHSLTLRREATEPPPSQEGPSPAVPSIYATLAIH

SEQ ID NO: 2022 - protein, 82 aa, synthetic construct
  REGION 1..82: note = Description of Artificial Sequence: Syntheticpolypeptide
LTRKKKALRIHSVEGDLRRKSAGQEEWSPSAPSPPGSCVQAEAAPAGLCGEQRGEDCAELHDYFNVLSYRSLGNCSFFTETG

SEQ ID NO: 2023 - protein, 74 aa, synthetic construct
  REGION 1..74: note = Description of Artificial Sequence: Syntheticpolypeptide
HFGKTGRASDQRDLTEHKPSVSNHTQDHSNDPPNKMNEVTYSTLNFEAQQPTQPTSASPSLTATEIIYSEVKKQ

SEQ ID NO: 2024 - protein, 434 aa, synthetic construct
  REGION 1..434: note = Description of Artificial Sequence: Syntheticpolypeptide
KYKQKPKYQVRWKIIESYEGNSYTFIDPTQLPYNEKWEFPRNNLQFGKTLGAGAFGKVVEATAFGLGKEDAVLKVAVKMLKSTAHADEKEALMSELKIMSHLGQHENIVNLLGACTHGGPVLVITEYCCYGDLLNFLRRKAEAMLGPSLSPGQDPEGGVDYKNIHLEKKYVRRDSGFSSQGVDTYVEMRPVSTSSNDSFSEQDLDKEDGRPLELRDLLHFSSQVAQGMAFLASKNCIHRDVAARNVLLTNGHVAKIGDFGLARDIMNDSNYIVKGNARLPVKWMAPESIFDCVYTVQSDVWSYGILLWEIFSLGLNPYPGILVNSKFYKLVKDGYQMAQPAFAPKNIYSIMQACWALEPTHRPTFQQICSFLQEQAQEDRRERDYTNLPSSSRSGGSGSSSSELEEESSSEHLTCCEQGDIAQPLLQPNNYQFC

SEQ ID NO: 2025 - protein, 93 aa, synthetic construct
  REGION 1..93: note = Description of Artificial Sequence: Syntheticpolypeptide
KKLVKKFRQKKQRQWIGPTGMNQNMSFHRNHTATVRSHAENPTASHVDNEYSQPPRNSHLSAYPALEGALHRSSMQPDNSSDSDYDLHGAQRL

SEQ ID NO: 2026 - protein, 45 aa, synthetic construct
  REGION 1..45: note = Description of Artificial Sequence: Syntheticpolypeptide
RKWCQYQKEIMERPPPFKPPPPPIKYTCIQEPNESDLPYHEMETL

SEQ ID NO: 2027 - protein, 141 aa, synthetic construct
  REGION 1..141: note = Description of Artificial Sequence: Syntheticpolypeptide
KLQRRWKRTQSQQGLQENSSGQSFFVRNKKVRRAPLSEGPHSLGCYNPMMEDGISYTTLRFPEMNIPRTGDAESSEMQRPPPDCDDTVTYSALHKRQVGDYENVIPDFPEDEGIHYSELIQFGVGERPQAQENVDYVILKH

SEQ ID NO: 2028 - protein, 26 aa, synthetic construct
  REGION 1..26: note = Description of Artificial Sequence: Syntheticpeptide
RKPQVVPPPQQNDLEIPESPTYENFT

SEQ ID NO: 2029 - protein, 25 aa, synthetic construct
  REGION 1..25: note = Description of Artificial Sequence: Syntheticpeptide
GKSQPKAQNPARLSRKELENFDVYS

SEQ ID NO: 2030 - protein, 4 aa, synthetic construct
  REGION 1..4: note = Description of Artificial Sequence: Syntheticpeptide
GGGS

SEQ ID NO: 2031 - protein, 5 aa, synthetic construct
  REGION 1..5: note = Description of Artificial Sequence: Syntheticpeptide
GGGGS

SEQ ID NO: 2032 - protein, 20 aa, synthetic construct
  REGION 1..20: note = Description of Artificial Sequence: Syntheticpeptide
GGGGSGGGGSGGGGSGGGGS

SEQ ID NO: 2033 - protein, 15 aa, synthetic construct
  REGION 1..15: note = Description of Artificial Sequence: Syntheticpeptide
GGGGSGGGGSGGGGS

SEQ ID NO: 2034 - protein, 60 aa, synthetic construct
  REGION 1..60: note = Description of Artificial Sequence: Syntheticpolypeptide
  REGION 1..5: note = MISC_FEATURE - This region may encompass 1-5 residues
  REGION 7..11: note = MISC_FEATURE - This region may encompass 1-5 residues
  REGION 13..17: note = MISC_FEATURE - This region may encompass 1-5 residues
  REGION 19..23: note = MISC_FEATURE - This region may encompass 1-5 residues
  REGION 25..29: note = MISC_FEATURE - This region may encompass 1-5 residues
  REGION 31..35: note = MISC_FEATURE - This region may encompass 1-5 residues
  REGION 37..41: note = MISC_FEATURE - This region may encompass 1-5 residues
  REGION 43..47: note = MISC_FEATURE - This region may encompass 1-5 residues
  REGION 49..53: note = MISC_FEATURE - This region may encompass 1-5 residues
  REGION 55..59: note = MISC_FEATURE - This region may encompass 1-5 residues
  REGION 1..60: note = MISC_FEATURE - This sequence may encompass 1-10 "(Gly)x Ser"repeating units, wherein x = 1, 2, 3, 4 or 5
GGGGGSGGGGGSGGGGGSGGGGGSGGGGGSGGGGGSGGGGGSGGGGGSGGGGGSGGGGGS

SEQ ID NO: 2035 - protein, 6 aa, synthetic construct
  REGION 1..6: note = Description of Artificial Sequence: Syntheticpeptide
GGGGGS

SEQ ID NO: 2036 - RNA, 5000 nt, synthetic construct
  misc_feature 1..5000: note = Description of Artificial Sequence: Syntheticpolynucleotide
  misc_feature 1..5000: note = This sequence may encompass 50-5000 nucleotides
  misc_feature 1..5000: note = See specification as filed for detailed description ofsubstitutions and preferred embodiments
  source 1..5000: mol_type = other RNA
aaaaaaaaaaaaaaaaaaaaaaaaaaaaaaaaaaaaaaaaaaaaaaaaaaaaaaaaaaaaaaaaaaaaaaaaaaaaaaaaaaaaaaaaaaaaaaaaaaaaaaaaaaaaaaaaaaaaaaaaaaaaaaaaaaaaaaaaaaaaaaaaaaaaaaaaaaaaaaaaaaaaaaaaaaaaaaaaaaaaaaaaaaaaaaaaaaaaaaaaaaaaaaaaaaaaaaaaaaaaaaaaaaaaaaaaaaaaaaaaaaaaaaaaaaaaaaaaaaaaaaaaaaaaaaaaaaaaaaaaaaaaaaaaaaaaaaaaaaaaaaaaaaaaaaaaaaaaaaaaaaaaaaaaaaaaaaaaaaaaaaaaaaaaaaaaaaaaaaaaaaaaaaaaaaaaaaaaaaaaaaaaaaaaaaaaaaaaaaaaaaaaaaaaaaaaaaaaaaaaaaaaaaaaaaaaaaaaaaaaaaaaaaaaaaaaaaaaaaaaaaaaaaaaaaaaaaaaaaaaaaaaaaaaaaaaaaaaaaaaaaaaaaaaaaaaaaaaaaaaaaaaaaaaaaaaaaaaaaaaaaaaaaaaaaaaaaaaaaaaaaaaaaaaaaaaaaaaaaaaaaaaaaaaaaaaaaaaaaaaaaaaaaaaaaaaaaaaaaaaaaaaaaaaaaaaaaaaaaaaaaaaaaaaaaaaaaaaaaaaaaaaaaaaaaaaaaaaaaaaaaaaaaaaaaaaaaaaaaaaaaaaaaaaaaaaaaaaaaaaaaaaaaaaaaaaaaaaaaaaaaaaaaaaaaaaaaaaaaaaaaaaaaaaaaaaaaaaaaaaaaaaaaaaaaaaaaaaaaaaaaaaaaaaaaaaaaaaaaaaaaaaaaaaaaaaaaaaaaaaaaaaaaaaaaaaaaaaaaaaaaaaaaaaaaaaaaaaaaaaaaaaaaaaaaaaaaaaaaaaaaaaaaaaaaaaaaaaaaaaaaaaaaaaaaaaaaaaaaaaaaaaaaaaaaaaaaaaaaaaaaaaaaaaaaaaaaaaaaaaaaaaaaaaaaaaaaaaaaaaaaaaaaaaaaaaaaaaaaaaaaaaaaaaaaaaaaaaaaaaaaaaaaaaaaaaaaaaaaaaaaaaaaaaaaaaaaaaaaaaaaaaaaaaaaaaaaaaaaaaaaaaaaaaaaaaaaaaaaaaaaaaaaaaaaaaaaaaaaaaaaaaaaaaaaaaaaaaaaaaaaaaaaaaaaaaaaaaaaaaaaaaaaaaaaaaaaaaaaaaaaaaaaaaaaaaaaaaaaaaaaaaaaaaaaaaaaaaaaaaaaaaaaaaaaaaaaaaaaaaaaaaaaaaaaaaaaaaaaaaaaaaaaaaaaaaaaaaaaaaaaaaaaaaaaaaaaaaaaaaaaaaaaaaaaaaaaaaaaaaaaaaaaaaaaaaaaaaaaaaaaaaaaaaaaaaaaaaaaaaaaaaaaaaaaaaaaaaaaaaaaaaaaaaaaaaaaaaaaaaaaaaaaaaaaaaaaaaaaaaaaaaaaaaaaaaaaaaaaaaaaaaaaaaaaaaaaaaaaaaaaaaaaaaaaaaaaaaaaaaaaaaaaaaaaaaaaaaaaaaaaaaaaaaaaaaaaaaaaaaaaaaaaaaaaaaaaaaaaaaaaaaaaaaaaaaaaaaaaaaaaaaaaaaaaaaaaaaaaaaaaaaaaaaaaaaaaaaaaaaaaaaaaaaaaaaaaaaaaaaaaaaaaaaaaaaaaaaaaaaaaaaaaaaaaaaaaaaaaaaaaaaaaaaaaaaaaaaaaaaaaaaaaaaaaaaaaaaaaaaaaaaaaaaaaaaaaaaaaaaaaaaaaaaaaaaaaaaaaaaaaaaaaaaaaaaaaaaaaaaaaaaaaaaaaaaaaaaaaaaaaaaaaaaaaaaaaaaaaaaaaaaaaaaaaaaaaaaaaaaaaaaaaaaaaaaaaaaaaaaaaaaaaaaaaaaaaaaaaaaaaaaaaaaaaaaaaaaaaaaaaaaaaaaaaaaaaaaaaaaaaaaaaaaaaaaaaaaaaaaaaaaaaaaaaaaaaaaaaaaaaaaaaaaaaaaaaaaaaaaaaaaaaaaaaaaaaaaaaaaaaaaaaaaaaaaaaaaaaaaaaaaaaaaaaaaaaaaaaaaaaaaaaaaaaaaaaaaaaaaaaaaaaaaaaaaaaaaaaaaaaaaaaaaaaaaaaaaaaaaaaaaaaaaaaaaaaaaaaaaaaaaaaaaaaaaaaaaaaaaaaaaaaaaaaaaaaaaaaaaaaaaaaaaaaaaaaaaaaaaaaaaaaaaaaaaaaaaaaaaaaaaaaaaaaaaaaaaaaaaaaaaaaaaaaaaaaaaaaaaaaaaaaaaaaaaaaaaaaaaaaaaaaaaaaaaaaaaaaaaaaaaaaaaaaaaaaaaaaaaaaaaaaaaaaaaaaaaaaaaaaaaaaaaaaaaaaaaaaaaaaaaaaaaaaaaaaaaaaaaaaaaaaaaaaaaaaaaaaaaaaaaaaaaaaaaaaaaaaaaaaaaaaaaaaaaaaaaaaaaaaaaaaaaaaaaaaaaaaaaaaaaaaaaaaaaaaaaaaaaaaaaaaaaaaaaaaaaaaaaaaaaaaaaaaaaaaaaaaaaaaaaaaaaaaaaaaaaaaaaaaaaaaaaaaaaaaaaaaaaaaaaaaaaaaaaaaaaaaaaaaaaaaaaaaaaaaaaaaaaaaaaaaaaaaaaaaaaaaaaaaaaaaaaaaaaaaaaaaaaaaaaaaaaaaaaaaaaaaaaaaaaaaaaaaaaaaaaaaaaaaaaaaaaaaaaaaaaaaaaaaaaaaaaaaaaaaaaaaaaaaaaaaaaaaaaaaaaaaaaaaaaaaaaaaaaaaaaaaaaaaaaaaaaaaaaaaaaaaaaaaaaaaaaaaaaaaaaaaaaaaaaaaaaaaaaaaaaaaaaaaaaaaaaaaaaaaaaaaaaaaaaaaaaaaaaaaaaaaaaaaaaaaaaaaaaaaaaaaaaaaaaaaaaaaaaaaaaaaaaaaaaaaaaaaaaaaaaaaaaaaaaaaaaaaaaaaaaaaaaaaaaaaaaaaaaaaaaaaaaaaaaaaaaaaaaaaaaaaaaaaaaaaaaaaaaaaaaaaaaaaaaaaaaaaaaaaaaaaaaaaaaaaaaaaaaaaaaaaaaaaaaaaaaaaaaaaaaaaaaaaaaaaaaaaaaaaaaaaaaaaaaaaaaaaaaaaaaaaaaaaaaaaaaaaaaaaaaaaaaaaaaaaaaaaaaaaaaaaaaaaaaaaaaaaaaaaaaaaaaaaaaaaaaaaaaaaaaaaaaaaaaaaaaaaaaaaaaaaaaaaaaaaaaaaaaaaaaaaaaaaaaaaaaaaaaaaaaaaaaaaaaaaaaaaaaaaaaaaaaaaaaaaaaaaaaaaaaaaaaaaaaaaaaaaaaaaaaaaaaaaaaaaaaaaaaaaaaaaaaaaaaaaaaaaaaaaaaaaaaaaaaaaaaaaaaaaaaaaaaaaaaaaaaaaaaaaaaaaaaaaaaaaaaaaaaaaaaaaaaaaaaaaaaaaaaaaaaaaaaaaaaaaaaaaaaaaaaaaaaaaaaaaaaaaaaaaaaaaaaaaaaaaaaaaaaaaaaaaaaaaaaaaaaaaaaaaaaaaaaaaaaaaaaaaaaaaaaaaaaaaaaaaaaaaaaaaaaaaaaaaaaaaaaaaaaaaaaaaaaaaaaaaaaaaaaaaaaaaaaaaaaaaaaaaaaaaaaaaaaaaaaaaaaaaaaaaaaaaaaaaaaaaaaaaaaaaaaaaaaaaaaaaaaaaaaaaaaaaaaaaaaaaaaaaaaaaaaaaaaaaaaaaaaaaaaaaaaaaaaaaaaaaaaaaaaaaaaaaaaaaaaaaaaaaaaaaaaaaaaaaaaaaaaaaaaaaaaaaaaaaaaaaaaaaaaaaaaaaaaaaaaaaaaaaaaaaaaaaaaaaaaaaaaaaaaaaaaaaaaaaaaaaaaaaaaaaaaaaaaaaaaaaaaaaaaaaaaaaaaaaaaaaaaaaaaaaaaaaaaaaaaaaaaaaaaaaaaaaaaaaaaaaaaaaaaaaaaaaaaaaaaaaaaaaaaaaaaaaaaaaaaaaaaaaaaaaaaaaaaaaaaaaaaaaaaaaaaaaaaaaaaaaaaaaaaaaaaaaaaaaaaaaaaaaaaaaaaaaaaaaaaaaaaaaaaaaaaaaaaaaaaaaaaaaaaaaaaaaaaaaaaaaaaaaaaaaaaaaaaaaaaaaaaaaaaaaaaaaaaaaaaaaaaaaaaaaaaaaaaaaaaaaaaaaaaaaaaaaaaaaaaaaaaaaaaaaaaaaaaaaaaaaaaaaaaaaaaaaaaaaaaaaaaaaaaaaaaaaaaaaaaaaaaaaaaaaaaaaaaaaaaaaaaaaaaaaaaaaaaaaaaaaaaaaaaaaaaaaaaaaaaaaaaaaaaaaaaaaaaaaaaaaaaaaaaaaaaaaaaaaaaaaaaaaaaaaaaaaaaaaaaaaaaaaaaaaaaaaaaaaaaaaaaaaaaaaaaaaaaaaaaaaaaaaaaaaaaaaaaaaaaaaaaaaaaaaaaaaaaaaaaaaaaaaaaaaaaaaaaaaaaaaaaaaaaaaaaaaaaaaaaaaaaaaaaaaaaaaaaaaaaaaaaaaaaaaaaaaaaaaaaaaaaaaaaaaaaaaaaaaaaaaaaaaaaaaaaaaaaaaaaaaaaaaaaaaaaaaaaaaaaaaaaaaaaaaaaaaaaaaaaaaaaaaaaaaaaaaaaaaaaaaaaaaaaaaaaaaaaaaaaaaaaaaaaaaaaaaaaaaaaaaaaaaaaaaaaaaaaaaaaaaaaaaaaaaaaaaaaaaaaaaaaaaaaaaaaaaaaaaaaaaaaaaaaaaaaaaaaaaaaaaaaaaaaaaaaaaaaaaaaaaaaaaaaaaaaaaaaaaaaaaaaaaaaaaaaaaaaaaaaaaaaaaaaaaaaaaaaaaaaaaaaaaaaaaaaaaaaaaaaaaaaaaaaaaaaaaaaaaaaaaaaaaaaaaaaaaaaaaaaaaaaaaaaaaaaaaaaaaaaaaaaaaaaaaaaaaaaaaaaaaaaaaaaaaaaaaaaaaaaaaaaaaaaaaaaaaaaaaaaaaaaaaaaaaaaaaaaaaaaaaaaaaaaaaaaaaaaaaaaaaaaaaaaaaaaaaaaaaaaaaaaaaaaaaaaaaaaaaaaaaaaaaaaaaaaaaaa

SEQ ID NO: 2037 - protein, 600 aa, synthetic construct
  REGION 1..600: note = Description of Artificial Sequence: Syntheticpolypeptide
  REGION 1..5: note = MISC_FEATURE - This region may encompass 1-5 residues
  REGION 7..11: note = MISC_FEATURE - This region may encompass 1-5 residues
  REGION 13..17: note = MISC_FEATURE - This region may encompass 1-5 residues
  REGION 19..23: note = MISC_FEATURE - This region may encompass 1-5 residues
  REGION 25..29: note = MISC_FEATURE - This region may encompass 1-5 residues
  REGION 31..35: note = MISC_FEATURE - This region may encompass 1-5 residues
  REGION 37..41: note = MISC_FEATURE - This region may encompass 1-5 residues
  REGION 43..47: note = MISC_FEATURE - This region may encompass 1-5 residues
  REGION 49..53: note = MISC_FEATURE - This region may encompass 1-5 residues
  REGION 55..59: note = MISC_FEATURE - This region may encompass 1-5 residues
  REGION 61..65: note = MISC_FEATURE - This region may encompass 1-5 residues
  REGION 67..71: note = MISC_FEATURE - This region may encompass 1-5 residues
  REGION 73..77: note = MISC_FEATURE - This region may encompass 1-5 residues
  REGION 79..83: note = MISC_FEATURE - This region may encompass 1-5 residues
  REGION 85..89: note = MISC_FEATURE - This region may encompass 1-5 residues
  REGION 91..95: note = MISC_FEATURE - This region may encompass 1-5 residues
  REGION 97..101: note = MISC_FEATURE - This region may encompass 1-5 residues
  REGION 103..107: note = MISC_FEATURE - This region may encompass 1-5 residues
  REGION 109..113: note = MISC_FEATURE - This region may encompass 1-5 residues
  REGION 115..119: note = MISC_FEATURE - This region may encompass 1-5 residues
  REGION 121..125: note = MISC_FEATURE - This region may encompass 1-5 residues
  REGION 127..131: note = MISC_FEATURE - This region may encompass 1-5 residues
  REGION 133..137: note = MISC_FEATURE - This region may encompass 1-5 residues
  REGION 139..143: note = MISC_FEATURE - This region may encompass 1-5 residues
  REGION 145..149: note = MISC_FEATURE - This region may encompass 1-5 residues
  REGION 151..155: note = MISC_FEATURE - This region may encompass 1-5 residues
  REGION 157..161: note = MISC_FEATURE - This region may encompass 1-5 residues
  REGION 163..167: note = MISC_FEATURE - This region may encompass 1-5 residues
  REGION 169..173: note = MISC_FEATURE - This region may encompass 1-5 residues
  REGION 175..179: note = MISC_FEATURE - This region may encompass 1-5 residues
  REGION 181..185: note = MISC_FEATURE - This region may encompass 1-5 residues
  REGION 187..191: note = MISC_FEATURE - This region may encompass 1-5 residues
  REGION 193..197: note = MISC_FEATURE - This region may encompass 1-5 residues
  REGION 199..203: note = MISC_FEATURE - This region may encompass 1-5 residues
  REGION 205..209: note = MISC_FEATURE - This region may encompass 1-5 residues
  REGION 211..215: note = MISC_FEATURE - This region may encompass 1-5 residues
  REGION 217..221: note = MISC_FEATURE - This region may encompass 1-5 residues
  REGION 223..227: note = MISC_FEATURE - This region may encompass 1-5 residues
  REGION 229..233: note = MISC_FEATURE - This region may encompass 1-5 residues
  REGION 235..239: note = MISC_FEATURE - This region may encompass 1-5 residues
  REGION 241..245: note = MISC_FEATURE - This region may encompass 1-5 residues
  REGION 247..251: note = MISC_FEATURE - This region may encompass 1-5 residues
  REGION 253..257: note = MISC_FEATURE - This region may encompass 1-5 residues
  REGION 259..263: note = MISC_FEATURE - This region may encompass 1-5 residues
  REGION 265..269: note = MISC_FEATURE - This region may encompass 1-5 residues
  REGION 271..275: note = MISC_FEATURE - This region may encompass 1-5 residues
  REGION 277..281: note = MISC_FEATURE - This region may encompass 1-5 residues
  REGION 283..287: note = MISC_FEATURE - This region may encompass 1-5 residues
  REGION 289..293: note = MISC_FEATURE - This region may encompass 1-5 residues
  REGION 295..299: note = MISC_FEATURE - This region may encompass 1-5 residues
  REGION 301..305: note = MISC_FEATURE - This region may encompass 1-5 residues
  REGION 307..311: note = MISC_FEATURE - This region may encompass 1-5 residues
  REGION 313..317: note = MISC_FEATURE - This region may encompass 1-5 residues
  REGION 319..323: note = MISC_FEATURE - This region may encompass 1-5 residues
  REGION 325..329: note = MISC_FEATURE - This region may encompass 1-5 residues
  REGION 331..335: note = MISC_FEATURE - This region may encompass 1-5 residues
  REGION 337..341: note = MISC_FEATURE - This region may encompass 1-5 residues
  REGION 343..347: note = MISC_FEATURE - This region may encompass 1-5 residues
  REGION 349..353: note = MISC_FEATURE - This region may encompass 1-5 residues
  REGION 355..359: note = MISC_FEATURE - This region may encompass 1-5 residues
  REGION 361..365: note = MISC_FEATURE - This region may encompass 1-5 residues
  REGION 367..371: note = MISC_FEATURE - This region may encompass 1-5 residues
  REGION 373..377: note = MISC_FEATURE - This region may encompass 1-5 residues
  REGION 379..383: note = MISC_FEATURE - This region may encompass 1-5 residues
  REGION 385..389: note = MISC_FEATURE - This region may encompass 1-5 residues
  REGION 391..395: note = MISC_FEATURE - This region may encompass 1-5 residues
  REGION 397..401: note = MISC_FEATURE - This region may encompass 1-5 residues
  REGION 403..407: note = MISC_FEATURE - This region may encompass 1-5 residues
  REGION 409..413: note = MISC_FEATURE - This region may encompass 1-5 residues
  REGION 415..419: note = MISC_FEATURE - This region may encompass 1-5 residues
  REGION 421..425: note = MISC_FEATURE - This region may encompass 1-5 residues
  REGION 427..431: note = MISC_FEATURE - This region may encompass 1-5 residues
  REGION 433..437: note = MISC_FEATURE - This region may encompass 1-5 residues
  REGION 439..443: note = MISC_FEATURE - This region may encompass 1-5 residues
  REGION 445..449: note = MISC_FEATURE - This region may encompass 1-5 residues
  REGION 451..455: note = MISC_FEATURE - This region may encompass 1-5 residues
  REGION 457..461: note = MISC_FEATURE - This region may encompass 1-5 residues
  REGION 463..467: note = MISC_FEATURE - This region may encompass 1-5 residues
  REGION 469..473: note = MISC_FEATURE - This region may encompass 1-5 residues
  REGION 475..479: note = MISC_FEATURE - This region may encompass 1-5 residues
  REGION 481..485: note = MISC_FEATURE - This region may encompass 1-5 residues
  REGION 487..491: note = MISC_FEATURE - This region may encompass 1-5 residues
  REGION 493..497: note = MISC_FEATURE - This region may encompass 1-5 residues
  REGION 499..503: note = MISC_FEATURE - This region may encompass 1-5 residues
  REGION 505..509: note = MISC_FEATURE - This region may encompass 1-5 residues
  REGION 511..515: note = MISC_FEATURE - This region may encompass 1-5 residues
  REGION 517..521: note = MISC_FEATURE - This region may encompass 1-5 residues
  REGION 523..527: note = MISC_FEATURE - This region may encompass 1-5 residues
  REGION 529..533: note = MISC_FEATURE - This region may encompass 1-5 residues
  REGION 535..539: note = MISC_FEATURE - This region may encompass 1-5 residues
  REGION 541..545: note = MISC_FEATURE - This region may encompass 1-5 residues
  REGION 547..551: note = MISC_FEATURE - This region may encompass 1-5 residues
  REGION 553..557: note = MISC_FEATURE - This region may encompass 1-5 residues
  REGION 559..563: note = MISC_FEATURE - This region may encompass 1-5 residues
  REGION 565..569: note = MISC_FEATURE - This region may encompass 1-5 residues
  REGION 571..575: note = MISC_FEATURE - This region may encompass 1-5 residues
  REGION 577..581: note = MISC_FEATURE - This region may encompass 1-5 residues
  REGION 583..587: note = MISC_FEATURE - This region may encompass 1-5 residues
  REGION 589..593: note = MISC_FEATURE - This region may encompass 1-5 residues
  REGION 595..599: note = MISC_FEATURE - This region may encompass 1-5 residues
  REGION 1..600: note = MISC_FEATURE - This sequence may encompass 1-100 "(Gly)x Ser"repeating units, wherein x = 1, 2, 3, 4 or 5
GGGGGSGGGGGSGGGGGSGGGGGSGGGGGSGGGGGSGGGGGSGGGGGSGGGGGSGGGGGSGGGGGSGGGGGSGGGGGSGGGGGSGGGGGSGGGGGSGGGGGSGGGGGSGGGGGSGGGGGSGGGGGSGGGGGSGGGGGSGGGGGSGGGGGSGGGGGSGGGGGSGGGGGSGGGGGSGGGGGSGGGGGSGGGGGSGGGGGSGGGGGSGGGGGSGGGGGSGGGGGSGGGGGSGGGGGSGGGGGSGGGGGSGGGGGSGGGGGSGGGGGSGGGGGSGGGGGSGGGGGSGGGGGSGGGGGSGGGGGSGGGGGSGGGGGSGGGGGSGGGGGSGGGGGSGGGGGSGGGGGSGGGGGSGGGGGSGGGGGSGGGGGSGGGGGSGGGGGSGGGGGSGGGGGSGGGGGSGGGGGSGGGGGSGGGGGSGGGGGSGGGGGSGGGGGSGGGGGSGGGGGSGGGGGSGGGGGSGGGGGSGGGGGSGGGGGSGGGGGSGGGGGSGGGGGSGGGGGSGGGGGSGGGGGSGGGGGSGGGGGSGGGGGSGGGGGSGGGGGSGGGGGSGGGGGSGGGGGSGGGGGSGGGGGSGGGGGSGGGGGSGGGGGSGGGGGSGGGGGS

SEQ ID NO: 2038 - protein, 6 aa, synthetic construct
  REGION 1..6: note = Description of Artificial Sequence: Syntheticpeptide
VTYARL

SEQ ID NO: 2039 - protein, 6 aa, synthetic construct
  REGION 1..6: note = Description of Artificial Sequence: Syntheticpeptide
VVYYRV

SEQ ID NO: 2040 - protein, 6 aa, synthetic construct
  REGION 1..6: note = Description of Artificial Sequence: Syntheticpeptide
LIYSQV

SEQ ID NO: 2041 - protein, 6 aa, synthetic construct
  REGION 1..6: note = Description of Artificial Sequence: Syntheticpeptide
  MOD_RES 2: note = His or Gln
  MOD_RES 5: note = Val or Ser
LXYAXL

SEQ ID NO: 2042 - protein, 10 aa, synthetic construct
  REGION 1..10: note = Description of Artificial Sequence: Syntheticpeptide
GGGGSGGGGS

SEQ ID NO: 2043 - DNA, 30 bp, synthetic construct
  misc_feature 1..30: note = Description of Artificial Sequence: Syntheticoligonucleotide
  source 1..30: mol_type = other DNA
ggtggcggaggttctggaggtggaggttcc

SEQ ID NO: 2044 - protein, 400 aa, synthetic construct
  REGION 1..400: note = Description of Artificial Sequence: Syntheticpolypeptide
  REGION 1..400: note = MISC_FEATURE - This sequence may encompass 1-100 "Gly Gly Gly Ser"repeating units
  REGION 1..400: note = See specification as filed for detailed description ofsubstitutions and preferred embodiments
GGGSGGGSGGGSGGGSGGGSGGGSGGGSGGGSGGGSGGGSGGGSGGGSGGGSGGGSGGGSGGGSGGGSGGGSGGGSGGGSGGGSGGGSGGGSGGGSGGGSGGGSGGGSGGGSGGGSGGGSGGGSGGGSGGGSGGGSGGGSGGGSGGGSGGGSGGGSGGGSGGGSGGGSGGGSGGGSGGGSGGGSGGGSGGGSGGGSGGGSGGGSGGGSGGGSGGGSGGGSGGGSGGGSGGGSGGGSGGGSGGGSGGGSGGGSGGGSGGGSGGGSGGGSGGGSGGGSGGGSGGGSGGGSGGGSGGGSGGGSGGGSGGGSGGGSGGGSGGGSGGGSGGGSGGGSGGGSGGGSGGGSGGGSGGGSGGGSGGGSGGGSGGGSGGGSGGGSGGGSGGGSGGGSGGGSGGGSGGGS

SEQ ID NO: 2045 - protein, 500 aa, synthetic construct
  REGION 1..500: note = Description of Artificial Sequence: Syntheticpolypeptide
  REGION 1..500: note = MISC_FEATURE - This sequence may encompass 1-100 "Gly Gly Gly Gly Ser"repeating units
  REGION 1..500: note = See specification as filed for detailed description ofsubstitutions and preferred embodiments
GGGGSGGGGSGGGGSGGGGSGGGGSGGGGSGGGGSGGGGSGGGGSGGGGSGGGGSGGGGSGGGGSGGGGSGGGGSGGGGSGGGGSGGGGSGGGGSGGGGSGGGGSGGGGSGGGGSGGGGSGGGGSGGGGSGGGGSGGGGSGGGGSGGGGSGGGGSGGGGSGGGGSGGGGSGGGGSGGGGSGGGGSGGGGSGGGGSGGGGSGGGGSGGGGSGGGGSGGGGSGGGGSGGGGSGGGGSGGGGSGGGGSGGGGSGGGGSGGGGSGGGGSGGGGSGGGGSGGGGSGGGGSGGGGSGGGGSGGGGSGGGGSGGGGSGGGGSGGGGSGGGGSGGGGSGGGGSGGGGSGGGGSGGGGSGGGGSGGGGSGGGGSGGGGSGGGGSGGGGSGGGGSGGGGSGGGGSGGGGSGGGGSGGGGSGGGGSGGGGSGGGGSGGGGSGGGGSGGGGSGGGGSGGGGSGGGGSGGGGSGGGGSGGGGSGGGGSGGGGSGGGGSGGGGSGGGGSGGGGS

SEQ ID NO: 2046 - protein, 8 aa, synthetic construct
  REGION 1..8: note = Description of Artificial Sequence: Syntheticpeptide
SCDLLTAF

SEQ ID NO: 2047 - protein, 6 aa, synthetic construct
  REGION 1..6: note = Description of Artificial Sequence: Syntheticpeptide
IQYTEL

SEQ ID NO: 2048 - RNA, 2000 nt, synthetic construct
  misc_feature 1..2000: note = Description of Artificial Sequence: Syntheticpolynucleotide
  misc_feature 1..2000: note = This sequence may encompass 50-2000 nucleotides
  source 1..2000: mol_type = other RNA
aaaaaaaaaaaaaaaaaaaaaaaaaaaaaaaaaaaaaaaaaaaaaaaaaaaaaaaaaaaaaaaaaaaaaaaaaaaaaaaaaaaaaaaaaaaaaaaaaaaaaaaaaaaaaaaaaaaaaaaaaaaaaaaaaaaaaaaaaaaaaaaaaaaaaaaaaaaaaaaaaaaaaaaaaaaaaaaaaaaaaaaaaaaaaaaaaaaaaaaaaaaaaaaaaaaaaaaaaaaaaaaaaaaaaaaaaaaaaaaaaaaaaaaaaaaaaaaaaaaaaaaaaaaaaaaaaaaaaaaaaaaaaaaaaaaaaaaaaaaaaaaaaaaaaaaaaaaaaaaaaaaaaaaaaaaaaaaaaaaaaaaaaaaaaaaaaaaaaaaaaaaaaaaaaaaaaaaaaaaaaaaaaaaaaaaaaaaaaaaaaaaaaaaaaaaaaaaaaaaaaaaaaaaaaaaaaaaaaaaaaaaaaaaaaaaaaaaaaaaaaaaaaaaaaaaaaaaaaaaaaaaaaaaaaaaaaaaaaaaaaaaaaaaaaaaaaaaaaaaaaaaaaaaaaaaaaaaaaaaaaaaaaaaaaaaaaaaaaaaaaaaaaaaaaaaaaaaaaaaaaaaaaaaaaaaaaaaaaaaaaaaaaaaaaaaaaaaaaaaaaaaaaaaaaaaaaaaaaaaaaaaaaaaaaaaaaaaaaaaaaaaaaaaaaaaaaaaaaaaaaaaaaaaaaaaaaaaaaaaaaaaaaaaaaaaaaaaaaaaaaaaaaaaaaaaaaaaaaaaaaaaaaaaaaaaaaaaaaaaaaaaaaaaaaaaaaaaaaaaaaaaaaaaaaaaaaaaaaaaaaaaaaaaaaaaaaaaaaaaaaaaaaaaaaaaaaaaaaaaaaaaaaaaaaaaaaaaaaaaaaaaaaaaaaaaaaaaaaaaaaaaaaaaaaaaaaaaaaaaaaaaaaaaaaaaaaaaaaaaaaaaaaaaaaaaaaaaaaaaaaaaaaaaaaaaaaaaaaaaaaaaaaaaaaaaaaaaaaaaaaaaaaaaaaaaaaaaaaaaaaaaaaaaaaaaaaaaaaaaaaaaaaaaaaaaaaaaaaaaaaaaaaaaaaaaaaaaaaaaaaaaaaaaaaaaaaaaaaaaaaaaaaaaaaaaaaaaaaaaaaaaaaaaaaaaaaaaaaaaaaaaaaaaaaaaaaaaaaaaaaaaaaaaaaaaaaaaaaaaaaaaaaaaaaaaaaaaaaaaaaaaaaaaaaaaaaaaaaaaaaaaaaaaaaaaaaaaaaaaaaaaaaaaaaaaaaaaaaaaaaaaaaaaaaaaaaaaaaaaaaaaaaaaaaaaaaaaaaaaaaaaaaaaaaaaaaaaaaaaaaaaaaaaaaaaaaaaaaaaaaaaaaaaaaaaaaaaaaaaaaaaaaaaaaaaaaaaaaaaaaaaaaaaaaaaaaaaaaaaaaaaaaaaaaaaaaaaaaaaaaaaaaaaaaaaaaaaaaaaaaaaaaaaaaaaaaaaaaaaaaaaaaaaaaaaaaaaaaaaaaaaaaaaaaaaaaaaaaaaaaaaaaaaaaaaaaaaaaaaaaaaaaaaaaaaaaaaaaaaaaaaaaaaaaaaaaaaaaaaaaaaaaaaaaaaaaaaaaaaaaaaaaaaaaaaaaaaaaaaaaaaaaaaaaaaaaaaaaaaaaaaaaaaaaaaaaaaaaaaaaaaaaaaaaaaaaaaaaaaaaaaaaaaaaaaaaaaaaaaaaaaaaaaaaaaaaaaaaaaaaaaaaaaaaaaaaaaaaaaaaaaaaaaaaaaaaaaaaaaaaaaaaaaaaaaaaaaaaaaaaaaaaaaaaaaaaaaaaaaaaaaaaaaaaaaaaaaaaaaaaaaaaaaaaaaaaaaaaaaaaaaaaaaaaaaaaaaaaaaaaaaaaaaaaaaaaaaaaaaaaaaaaaaaaaaaaaaaaaaaaaaaaaaaaaaaaaaaaaaaaaaaaaaaaaaaaaaaaaaaaaaaaaaaaaaaaaaaaaaaaaaaaaaaaaaaaaaaaaaaaaaaaaaaaaaaaaaaaaaaaaaaaaaaaaaaaaaaaaaaaaaaaaaaaaaaaaaaaaaa

SEQ ID NO: 2049-2050 - skipped (2 entries)
